(19) United States
(12) Patent Application Publication
(10) Pub. No.: US 2014/0363469 A1
(43) Pub. Date: Dec. 11, 2014

(54) VIRAL ATTENUATION AND VACCINE PRODUCTION

(71) Applicant: Alnylam Pharmaceuticals, Inc., Cambridge, MA (US)

(72) Inventors: Rachel Meyers, Cambridge, MA (US); Brian Bettencourt, Cambridge, MA (US); Jamie Evan Wong, Cambridge, MA (US); John M. Maraganore, Cambridge, MA (US)

(21) Appl. No.: 14/373,195

(22) PCT Filed: Jan. 16, 2013
(86) PCT No.: PCT/US2013/021704

§ 371 Date: Jul. 18, 2014

Related U.S. Application Data
(60) Provisional application No. 61/588,309, filed on Jan. 19, 2012.

(51) Int. Cl. A61K 39/245; C12N 7/00

(52) U.S. Cl. CPC A61K 39/245; C12N 7/00; C12N 2710/16634; C12N 2710/16662
USPC 424/231.1; 435/236

(57) ABSTRACT

The present invention is directed to the generation of attenuated viruses or viral transcripts for the production of vaccines by incorporating microRNA binding sites within the viral target sequence of the pathogen.

### CROSS REFERENCE TO RELATED APPLICATIONS

[0001] This application claims the benefit of U.S. Provisional Application No. 61/588,309, filed Jan. 19, 2012 entitled “VIRAL ATTENUATION AND VACCINE PRODUCTION”, the contents of which is incorporated by reference in its entirety.

### REFERENCE TO SEQUENCE LISTING

[0002] The present application is being filed along with a Sequence Listing in electronic format. The Sequence Listing is provided as a file entitled ALN168WOSEQLST.txt created on Jan. 16, 2013 which is 1,070,041 bytes in size. The information in electronic format of the sequence listing is incorporated herein by reference in its entirety.

### FIELD OF THE INVENTION

[0003] The present invention is directed to the generation of attenuated viruses or viral transcripts for the production of vaccines.

### BACKGROUND OF THE INVENTION

[0004] Herpes simplex virus type 1 (HSV-1; HHV1) and Herpes simplex virus type 2 (HSV-2; HHV2) are common human pathogens which cause a variety of clinical illnesses, including oral-facial infections, genital herpes, ocular infections, herpes encephalitis, and neonatal herpes.

[0005] The Herpes simplex virus has a rapid lytic replication cycle and the ability to invade sensory neurons where highly restricted gene expression occurs during a latent or nonpathologic state. Such latent infections are subject to reactivation whereby infectious virus can be recovered in peripheral tissue enervated by the latently infected neurons following a specific physiological stress. A major factor in the switch from lytic to latent infection and back involves changes in transcription patterns, mainly as a result of the interaction between viral promoters, the viral genome, and cellular transcriptional machinery. The ability to interfere with any of these pathways could prove useful in the development of vaccines against the family of viruses.

[0006] To this end, efforts to effectively attenuate the HSV virus have met with significant challenges. The Herpes genome is quite large and complex. The genome of the Herpes virus is a nuclear replicating, double-stranded DNA approximately 152,000 base pairs in length which circularizes upon infection and which encodes some 100-200 genes. These genes encode a variety of proteins involved in forming the capsid, tegument and envelope of the virus, as well as controlling the replication and infectivity of the virus. The HSV envelope alone contains at least 8 glycoproteins while the matrix or tegument which contacts both the envelope and the capsid contains at least 15-20 proteins. Consequently, approaches to design an effective vaccine against HSV have been unsuccessful to date.

[0007] The present invention solves the problem in the art through the use of engineered viral transcripts (in whole or in part) incorporating one or more microRNA (miRNA) target or binding sites.

### SUMMARY OF THE INVENTION

[0008] Described herein are compositions and methods useful in the control, regulation, exploitation and study of viral transcripts, particularly those in the Herpesviridae family. Also described are compositions and methods for the diagnosis, prevention, amelioration and/or treatment of viral infections involving the replication status or activity of viruses, particularly Herpes viruses.

[0009] The present invention embraces, in one embodiment, a mutant HSV-1 strain comprising at least one miRNA site such as for example those listed in Table 3. The mutant HSV-1 strain may include one or more miRNA sites, is present in a translated or untranslated region of an HSV-1 gene encoded by the HSV-1 strain. In one embodiment, the untranslated region may be selected from the group consisting of the 3′UTR, the 5′ UTR, an intron, and an intragenic region. The miRNA sites may range in size from 17-25, or longer. They may also be subportions as small as 6 nucleotides in length. Where multiple miRNA sites are engineered into the viral target sequence, they may have the same or different sequences. There may be a plurality of miRNA sites, e.g., 2 or more, 3 or more or 5 or more. Further to the invention are methods of immunizing a subject with an HSV-1 antigen comprising contacting said subject with a composition comprising a mutant HSV-1 strain, mutant HSV-1 gene or mutant HSV-1 polynucleotide sequence, wherein the mutant strain, gene or polynucleotide sequence has been engineered to contain at least one miRNA site of Table 3. Administration may be more than once and may occur on an immunization or booster schedule. The composition administered as a vaccine may be formulated for systemic delivery and the formulation may comprise saline or include carriers and/or excipients. The vaccines may also be delivered with adjuvants such as lipids or lipid-like molecules.

[0010] The details of various embodiments of the invention are set forth in the description below. Other features, objects, and advantages of the invention will be apparent from the description and the drawings, and from the claims.

### BRIEF DESCRIPTION OF THE FIGURES

[0011] FIG. 1 is a schematic showing alternatives to engineering attenuated viruses by incorporating miRNA sites into the 5′UTR, CDS or 3′UTR of a viral transcript. Shown in FIG. 1A is the incorporation into the wild-type (wt) US1 gene of HSV-1 of mir-128, 135a and 183 sites to produce mutant (mt) sequences. Shown in FIG. 1B is the incorporation into the HSV-1 RL2 gene of mir-124 and mir-9 sites. In the figure, “nonessential” indicates that the first position of the miRNA-target pair is not essential for activity. “Silent” refers to a silent substitution, “Cons” means conservative replacement substitution; “Noncons” means nonconservative replacement substitution where “replacement” means changing the amino acid encoded by the codon containing that nucleotide.

### DETAILED DESCRIPTION OF THE INVENTION

[0012] The present invention is directed to the design, generation, and production of useful vaccines through attenuation or modification of wild-type viral sequences in order to elicit from a patient or subject an immune response sufficient to ensure protection against an insult from the pathogen in the future. In presently doing so, viral attenuation is achieved through the utilization of microRNA (miRNA) sequences (including miRNA seeds), sites and signatures.

[0013] Specifically, it has been discovered that incorporation of one or more miRNA sequences, seeds or signatures into an HSV viral target sequence can lead to post-infection or host-supported viral attenuation. This occurs because the presence of the incorporated miRNA site within the viral sequence elicits binding by endogenous microRNAs present in the cells or tissue. This binding may interfere with critical replication pathways and results in an attenuated virus which, by definition, may now function as a vaccine. As used herein, the term “miRNA site” refers to a nucleotide sequence to which a microRNA binds or associates. It should be understood that “binding” may follow traditional Watson-Crick hybridization rules or may reflect any stable association of the microRNA with the viral target sequence at or adjacent to the miRNA site.

[0014] For example, a mutant HSV strain, which is engineered to contain one or more miRNA sites (a region of nucleic acid sequence to which a miRNA will bind) would, upon entering a cell, such as an epithelial cell, be susceptible to binding by any microRNAs present which recognize the engineered site. Upon binding, viral replication or other critical viral lifecycle processes would be compromised thereby reducing or eliminating the threat of viral infection but providing a sufficient trigger for the host organism to mount an immune response.

[0015] According to the present invention, the virus which is the target of the vaccine will be one that is capable of infecting eukaryotic cells, e.g., mammalian cells, avian cells, murine cells, human cells and the like. In various embodiments, the virus belongs to the Herpesviridae, Retroviridae, Reoviridae, Adenoviridae, Flaviviridae, Poxyiridae, Caliciviridae, Togaviridae, Coronaviridae, Rhabdoviridae, Filoviridae, Paramyxoviridae, Orthomyxoviridae, Bunyaviridae, Arenaviridae, Bornaviridae, Polyomaviridae, Papillomaviridae, Parvoviridae, Hepadnaviridae or Picornaviridae families.

[0016] In one embodiment, the virus is selected from Adenovirus, Cytomegalovirus (e.g., HCMV, HHV5), Epstein Barr virus (e.g., EBV, HHV4), Human Papilloma virus (HPV), MHV-68, Human Immunodeficiency Virus (HIV), Hepatitis A Virus (HAV), Hepatitis B Virus (HBV), Hepatitis C Virus (HCV), Hepatitis E Virus (HEV), Rubella Virus, Mumps Virus, Measles Virus, Respiratory Syncytial Virus, Human T-cell Leukemia Virus, Lentivirus, Herpes Simplex Virus (e.g., Herpes Simplex 1 (HSV1, HHV1), Herpes Simplex 2 (HSV2, HHV2)), Varicella-Zoster Virus (e.g., HHV3), Human Herpesviruses 6A, 6B, and 7, Kaposi's Sarcoma-Associated Herpesvirus (e.g., KSHV, HHV8), Cercopithecine Herpesvirus, Hepatitis Delta Virus, Dengue Virus, Foot and Mouth Disease Virus, Polyomavirus (e.g., JC, BK), Poliovirus, Coxsackievirus, Echovirus, Rhinovirus, Vacciniavirus, Small Pox Virus, Influenza Virus, or Avian Influenza Virus.

[0017] In particular, the virus belongs to the Herpesviridae family and is selected from the alpha viruses (HHV1, HHV2 or HHV3), the beta viruses (HHV5, 6A, 6B or HHV7) or the gamma viruses (HHV8 or HHV4).

[0018] According to the present invention wild-type viral sequences are engineered to contain one or more miRNA sequences, sites or signatures thus producing a mutant viral sequence. A “viral sequence” or “viral target sequence” includes any polynucleotide (DNA or RNA or combination thereof) which is viral in origin. As used herein, “wild-type” means that state, status or type which is naturally found in nature. “Mutant (mt)” sequences are those which have been altered in some form whether by insertion, deletion, duplication, inversion or the like and which differ from the wild-type version of the sequence.

[0019] The wild-type viral target sequences to be engineered include genomic sequences (in whole or in part), gene sequences, or subregions or features of these sequences such as repeat regions, inverted regions, polyA tails, coding regions, promoters, 5′ or 3′ untranslated regions (UTRs), intronic regions, or any intervening viral sequence or subportion thereof.

[0020] Shown in Table 1 are representative examples of viral targets of the present invention. Listed in Table 2 are the 77 genes of the HSV-1 genome. Given are the nucleotide ranges of SEQ ID NO: 1 that define each of the genes. Where the range is preceded by the term “Complement” it is to be understood that the particular gene is encoded on the opposite strand of the dsDNA virus and hence the sequence represents the complement of the nucleotide range given. Also listed is a description of the type of protein encoded by each gene.

TABLE 1

| | Viral Transcript Reference | |
|---|---|---|
| Virus Name | Sequence (genome) | SEQ ID |
| HSV-1 | NC_001806.1 | 1 |
| HSV-2 | NC_001798.1 | 2 |

TABLE 2

| | | Nucleotide range of | |
|---|---|---|---|
| | HSV-1 | NC_001806.1 | |
| | Gene | (SEQ ID 1) | Protein Product |
| 1 | RL1 | 513-1539 | neurovirulence protein ICP34.5 |
| 2 | RL2 | 2086-5698 | Ubiquitin E3 ligase ICP0 |
| 3 | UL1 | 9337-10948 | Envelope glycoprotein L |
| 4 | UL2 | 9884-10948 | Uracyl-DNA glycosylase |
| 5 | UL3 | 10957-11720 | Nuclear protein UL3 |
| 6 | UL4 | Complement (11753-12422) | Nuclear protein UL4 |
| 7 | UL5 | Complement (11753-15131) | helicase-primase helicase subunit |
| 8 | UL6 | 15130-18040 | Capsid portal protein |
| 9 | UL7 | 17135-18040 | Tegument protein UL7 |
| 10 | UL8 | Complement (18210-20476) | helicase-primase subunit |
| 11 | UL9 | Complement (18210-23259) | DNA replication origin-binding helicase |
| 12 | UL10 | 23204-24648 | envelope glycoprotein M |
| 13 | UL11 | Complement (24800-25501) | myristylated tegument protein |
| 14 | UL12 | Complement (24800-27046) | deoxyribonuclease |
| 15 | UL13 | Complement (24800-28691) | tegument serine/threonine protein kinase |
| 16 | UL14 | Complement (24800-28915) | tegument protein UL14 |
| 17 | UL15 | 28804-34825 | DNA packaging terminase subunit 1 |
| 18 | UL16 | Complement (30173-31670) | tegument protein UL16 |
| 19 | UL17 | Complement (30173-33666) | DNA packaging tegument protein UL17 |
| 20 | UL18 | Complement (35023-36051) | Capsid triplex subunit 2 |
| 21 | UL19 | Complement (35023-40768) | Major capsid protein |
| 22 | UL20 | Complement (35023-41488) | Envelope protein UL20 |
| 23 | UL21 | 42074-43695 | Tegument protein UL21 |
| 24 | UL22 | Complement (43824-46581) | Envelope glycoprotein H |
| 25 | UL23 | Complement (46608-47911) | Thymidine kinase |
| 26 | UL24 | 47737-48744 | Nuclear protein UL24 |
| 27 | UL25 | 48813-52771 | DNA packaging tegument protein UL25 |
| 28 | UL26 | 50809-52771 | Capsid maturation protease |
| 29 | UL26.5 | 51727-52771 | Capsid scaffold protein |
| 30 | UL27 | Complement (53058-56080) | Envelope glycoprotein B |
| 31 | UL28 | Complement (53058-58320) | DNA packaging terminase subunit 2 |
| 32 | UL29 | Complement (58409-62053) | Single-stranded DNA-binding protein |
| 33 | UL30 | 62606-66553 | DNA polymerase catalytic subunit |
| 34 | UL31 | Complement (66377-67379) | Nuclear egress lamina protein |
| 35 | UL32 | Complement (66377-69162) | DNA packaging protein UL32 |
| 36 | UL33 | 69161-70943 | DNA packaging protein UL33 |
| 37 | UL34 | 69633-70943 | Nuclear egress membrane protein |
| 38 | UL35 | 70566-70943 | Small capsid protein |
| 39 | UL36 | Complement (70983-80543) | Large tegument protein |
| 40 | UL37 | Complement (80712-84084) | Tegument protein UL37 |
| 41 | UL38 | 84531-86021 | Capsid triplex subunit 1 |
| 42 | UL39 | 86217-90988 | Ribonucleotide reductase subunit 1 |
| 43 | UL40 | 89773-90988 | Ribonucleotide reductase subunit 2 |
| 44 | UL41 | Complement (91116-92740) | Tegument host shutoff protein |
| 45 | UL42 | 92920-94638 | DNA polymerase processivity subunit |
| 46 | UL43 | 94748-96068 | Envelope protein UL43 |
| 47 | UL44 | 96168-98998 | Envelope glycoprotein C |
| 48 | UL45 | 97953-98668 | Membrane protein UL45 |
| 49 | UL46 | Complement (98726-100998) | Tegument protein VP11/12 |
| 50 | UL47 | Complement (98726-103116) | Tegument protein VP13/14 |
| 51 | UL48 | Complement (103537-105259) | Transactivating tegument protein VP16 |
| 52 | UL49A | Complement (105462-106993) | Envelope glycoprotein N |
| 53 | UL49 | Complement (105462-106391) | Tegument protein VP22 |
| 54 | UL50 | 107010-108157 | Deoxyuridine triphosphatase |
| 55 | UL51 | Complement (108276-109011) | Tegument protein UL51 |
| 56 | UL52 | 109048-113448 | Helicase-primase primase subunit |
| 57 | UL53 | 112179-113448 | Envelope glycoprotein K |
| 58 | UL54 | 113596-115282 | Multifunctional expression regulator |
| 59 | UL55 | 115496-116103 | Nuclear protein UL55 |
| 60 | UL56 | Complement (116196-116925) | membrane protein UL56 |
| 61 | RL2 | Complement (120673-124285) | Ubiquitin E3 ligase ICP0 |
| 62 | RL1 | Complement (124832-125858) | Neurovirulence protein ICP34.5 |
| 63 | RS1 | Complement (127170-131457) | Transcriptional regulator ICP4 |
| 64 | US1 | 132098-133960 | Regulator protein ICP22 |
| 65 | US2 | Complement (134023-135333) | Virion protein US2 |
| 66 | US3 | 134934-137531 | Serine/threonine protein kinase US3 |
| 67 | US4 | 136702-137531 | Envelope glycoprotein G |
| 68 | US5 | 137596-141048 | Envelope glycoprotein J |
| 69 | US6 | 138309-141048 | Envelope glycoprotein D |
| 70 | US7 | 139668-141048 | Envelope glycoprotein I |
| 71 | US8 | 141139-143693 | Envelope glycoprotein E |
| 72 | US8A | 142744-143693 | Membrane protein US8A |
| 73 | US9 | 143219-143693 | Membrane protein US9 |
| 74 | US10 | Complement (144119-145194) | Virion protein US10 |
| 75 | US11 | Complement (144119-145490) | Tegument protein US11 |
| 76 | US12 | Complement (144119-146135) | TAP transporter inhibitor ICP47 |
| 77 | RS1 | 146776-151063 | Transcriptional regulator ICP4 |

[0021] Of the 77 genes in the HSV-1 genome, certain genes are more likely targets for attenuation. These include, the essential DNA replication HSV proteins: UL9, UL29, UL5, UL52, ULB, UL30, UL42; the immediate early genes: ICPO, ICP4, ICP27, ICP22; and the immune evasion genes: ICP47, and UL4.

[0022] Viral attenuation for the production of a vaccine may be achieved in one of several ways. For example, incorporation of one or more miRNA sites or signatures into a wild-type viral target sequence and then administration of the mutant viral strain may result in attenuation. As used herein “attenuation” means the process by which an infectious agent is altered in whole or part so that it becomes harmless or less virulent. An attenuated virus may serve as a vaccine. It is also understood that a portion, gene, or region of the viral target sequences comprising one or more miRNA sites described here may serve as a vaccine. A “vaccine” is any composition, compound or molecule that improves immunity to a particular disease. Vaccines of the present invention may be used to stimulate the production of antibodies and provide immunity against one or more diseases, viral and the like. In some cases, a vaccine resembles a disease-causing microorganism such as a virus, and is often made from weakened or killed forms of the virus, its toxins or one of its proteins. Vaccines of the present invention may be polynucleotides, polypeptides or combinations of both, e.g., chimeric molecules. They may be bound or associated with non-nucleic acid or non-protein moieties or conjugates. Vaccines of the present invention may comprise an entire viral genome which has been mutated by the addition of one miRNA site which shares some homology to the insertion point and they may also comprise the viral genome which has had inserted therein multiple sites. These multiple sites may be incorporated into one viral region or feature, e.g., a 3′UTR, or may be inserted across multiple features of the viral genome. Further, the present invention is not limited to the insertion or engineering of only one miRNA site (one miRNA sequences' complement) per viral target sequence. Multiple different miRNA may be used as the source of sites to be inserted. Likewise, the exact site sequence need not be used. Sites inserted may be 100% identical to the wild-type miRNA site. They may also be at least 90%, at least 80%, at least 70%, at least 60%, at least 50%, at least 40%, at least 30% or at least 20% identical. It will be understood that the percent identity may be higher where shorter mature miRNA sites or miRNA seed sites are used.

[0023] Fusion molecules are also contemplated by the invention. Fusion of the viral genome, gene, or target sequence to one or more nucleic acids or proteins is contemplated. For research purposes, it will be useful to fuse one or more viral target sequences (whether wild type or mutant) to a reporter molecule such as luciferase. Dual reporters may also be used and may be fluorescent, colorimetric, etc.

[0024] In one embodiment the viral target sequence of the vaccine will be of Herpes virus origin. In one embodiment the viral target sequence will be derived from the HSV-1 genome (SEQ ID NO:1). Where the vaccines of the present invention are nucleic acid based, they will comprise at least one miRNA binding or target site.

[0025] The viral target sequence of the vaccines of the present invention may comprise the entire HSV genome with one or more added miRNA binding sites or may be a portion of the HSV genome. As used herein, an miRNA “binding site” refers to a sequence that may foster interaction of an miRNA and the sequence. This interaction need not be complete binding as that term is known in the art and may be less than 100 percent hybridization. A binding site may also be referred to as a “target site”. Mismatches as between the sequence of any endogenous miRNA and the binding or targeting site engineered into the viral target sequence is contemplated as part of the invention.

[0026] In one embodiment, the vaccine is an HSV mutant strain DNA polynucleotide which is 152,261 nucleotides in length and comprises one or more miRNA binding sites engineered into the wild type genome to produce the mutant strain.

[0027] In one embodiment the vaccine of the invention is between 100,000-200,000 nucleotides in length. The vaccine may be composed of only one of the genes of the virus which has incorporated or engineered therein, one or more miRNA binding sites. In this embodiment the vaccine sequence may be from 100 to 100,000, from 500 to 50,000, from 1,000 to 5,000 nucleotides in length. It is to be understood that where the virus is a double stranded virus (whether DNA or RNA), the lengths recited or listed ranges may refer to the number of base pairs present in the vaccine.

[0028] Mammalian genomes are predicted to encode at least 200 to 1000 distinct miRNAs, many of which are estimated to interact with 5-10 different mRNA transcripts. Accordingly, miRNAs are predicted to regulate most if not all genes. miRNAs are differentially expressed in various tissues, such that each tissue is characterized by a specific set of miRNAs. miRNAs have been shown to be important modulators of cellular pathways including growth and proliferation, apoptosis, and developmental timing.

[0029] In the context of the present invention, miRNA sequences, including their pre-, pri- and mature sequences, as well as miRNA seeds and signatures may be used to design miRNA sites which are added to wild type viral target sequences in order to produce the vaccine compositions of the present invention.

[0030] The miRNA sequences (including miRNA seeds, sites, signatures and/or precursors) which may be incorporated into the wild type viral target sequences may be from any known miRNA such as those taught in US Publication US2005/0261218 and US Publication US2005/0059005, the contents of which are incorporated herein by reference in their entirety.

[0031] The miRNA sites of the present invention may encompass “miRNA precursors” or “mature miRNA” or variants or “miRNA seeds”, or combinations thereof. A miRNA “seed” is that sequence with nucleotide identity at positions 2-8 of the mature miRNA. In one embodiment, a miRNA seed comprises positions 2-7 of the mature miRNA. In another embodiment, a miRNA seed may comprise 8 nucleotides (e.g., nucleotides 2-8 of the mature miRNA) having an adenine (A) at position 1. In another embodiment, a miRNA seed may comprise 7 nucleotides (e.g., nucleotides 2-7 of the mature miRNA) having an adenine (A) at position 1. See for example, Grimson A, Farh K K, Johnston W K, Garrett-Engele P, Lim L P, Bartel D P; Mol. Cell. 2007 Jul. 6; 27(1):91-105.

[0032] As used herein, the term “miRNA precursor” is used to encompass, without limitation, primary RNA transcripts, pri-miRNAs and pre-miRNAs. Examples of small non-coding RNAs include, but are not limited to, primary miRNA transcripts (also known as pri-pre-miRNAs, pri-mirs and pri-miRNAs, which range from around 70 nucleotides to about 450 nucleotides in length and often taking the form of a hairpin structure); pre-miRNAs (also known as pre-mirs and foldback miRNA precursors, which range from around 50 nucleotides to around 110 nucleotides in length); miRNAs (also known as microRNAs, Mirs, miRs, mirs, and mature miRNAs, and generally refer either to intermediate molecules around 17 to about 25 nucleotides in length, or to single-stranded miRNAs, which may comprise a bulged structure upon hybridization with a partially complementary target nucleic acid molecule); or mimics of pri-miRNAs, pre-miRNAs or miRNAs. Examples of each of these types of miRNA constructs is taught in, for example, US Publication US2005/0261218 to Esau et. al, the contents of which are incorporated herein by reference in its entirety.

[0033] In some embodiments, the pri-miRNAs which may be incorporated into viral target sequences to create a miRNA binding site are 70 to 450 nucleobases in length. One having ordinary skill in the art will appreciate that this embodies compounds of 70, 71, 72, 73, 74, 75, 76, 77, 78, 79, 80, 81, 82, 83, 84, 85, 86, 87, 88, 89, 90, 91, 92, 93, 94, 95, 96, 97, 98, 99, 100, 101, 102, 103, 104, 105, 106, 107, 108, 109, 110, 111, 112, 113, 114, 115, 116, 117, 118, 119, 120, 121, 122, 123, 124, 125, 126, 127, 128, 129, 130, 131, 132, 133, 134, 135, 136, 137, 138, 139, 140, 141, 142, 143, 144, 145, 146, 147, 148, 149, 150, 151, 152, 153, 154, 155, 156, 157, 158, 159, 160, 161, 162, 163, 164, 165, 166, 167, 168, 169, 170, 171, 172, 173, 174, 175, 176, 177, 178, 179, 180, 181, 182, 183, 184, 185, 186, 187, 188, 189, 190, 191, 192, 193, 194, 195, 196, 197, 198, 199, 200, 201, 202, 203, 204, 205, 206, 207, 208, 209, 210, 211, 212, 213, 214, 215, 216, 217, 218, 219, 220, 221, 222, 223, 224, 225, 226, 227, 228, 229, 230, 231, 232, 233, 234, 235, 236, 237, 238, 239, 240, 241, 242, 243, 244, 245, 246, 247, 248, 249, 250, 251, 252, 253, 254, 255, 256, 257, 258, 259, 260, 261, 262, 263, 264, 265, 266, 267, 268, 269, 270, 271, 272, 273, 274, 275, 276, 277, 278, 279, 280, 281, 282, 283, 284, 285, 286, 287, 288, 289, 290, 291, 292, 293, 294, 295, 296, 297, 298, 299, 300, 301, 302, 303, 304, 305, 306, 307, 308, 309, 310, 311, 312, 313, 314, 315, 316, 317, 318, 319, 320, 321, 322, 323, 324, 325, 326, 327, 328, 329, 330, 331, 332, 333, 334, 335, 336, 337, 338, 339, 340, 341, 342, 343, 344, 345, 346, 347, 348, 349, 350, 351, 352, 353, 354, 355, 356, 357, 358, 359, 360, 361, 362, 363, 364, 365, 366, 367, 368, 369, 370, 371, 372, 373, 374, 375, 376, 377, 378, 379, 380, 381, 382, 383, 384, 385, 386, 387, 388, 389, 390, 391, 392, 393, 394, 395, 396, 397, 398, 399, 400, 401, 402, 403, 404, 405, 406, 407, 408, 409, 410, 411, 412, 413, 414, 415, 416, 417, 418, 419, 420, 421, 422, 423, 424, 425, 426, 427, 428, 429, 430, 431, 432, 433, 434, 435, 436, 437, 438, 439, 440, 441, 442, 443, 444, 445, 446, 447, 448, 449 or 450 nucleobases in length, or any range therewithin.

[0034] In some embodiments, pri-miRNAs, which may be incorporated into viral target sequences to create a miRNA binding site are 110 to 430 nucleobases in length. One having ordinary skill in the art will appreciate that this embodies compounds of 110, 111, 112, 113, 114, 115, 116, 117, 118, 119, 120, 121, 122, 123, 124, 125, 126, 127, 128, 129, 130, 131, 132, 133, 134, 135, 136, 137, 138, 139, 140, 141, 142, 143, 144, 145, 146, 147, 148, 149, 150, 151, 152, 153, 154, 155, 156, 157, 158, 159, 160, 161, 162, 163, 164, 165, 166, 167, 168, 169, 170, 171, 172, 173, 174, 175, 176, 177, 178, 179, 180, 181, 182, 183, 184, 185, 186, 187, 188, 189, 190, 191, 192, 193, 194, 195, 196, 197, 198, 199, 200, 201, 202, 203, 204, 205, 206, 207, 208, 209, 210, 211, 212, 213, 214, 215, 216, 217, 218, 219, 220, 221, 222, 223, 224, 225, 226, 227, 228, 229, 230, 231, 232, 233, 234, 235, 236, 237, 238, 239, 240, 241, 242, 243, 244, 245, 246, 247, 248, 249, 250, 251, 252, 253, 254, 255, 256, 257, 258, 259, 260, 261, 262, 263, 264, 265, 266, 267, 268, 269, 270, 271, 272, 273, 274, 275, 276, 277, 278, 279, 280, 281, 282, 283, 284, 285, 286, 287, 288, 289, 290, 291, 292, 293, 294, 295, 296, 297, 298, 299, 300, 301, 302, 303, 304, 305, 306, 307, 308, 309, 310, 311, 312, 313, 314, 315, 316, 317, 318, 319, 320, 321, 322, 323, 324, 325, 326, 327, 328, 329, 330, 331, 332, 333, 334, 335, 336, 337, 338, 339, 340, 341, 342, 343, 344, 345, 346, 347, 348, 349, 350, 351, 352, 353, 354, 355, 356, 357, 358, 359, 360, 361, 362, 363, 364, 365, 366, 367, 368, 369, 370, 371, 372, 373, 374, 375, 376, 377, 378, 379, 380, 381, 382, 383, 384, 385, 386, 387, 388, 389, 390, 391, 392, 393, 394, 395, 396, 397, 398, 399, 400, 401, 402, 403, 404, 405, 406, 407, 408, 409, 410, 411, 412, 413, 414, 415, 416, 417, 418, 419, 420, 421, 422, 423, 424, 425, 426, 427, 428, 429 or 430 nucleobases in length, or any range therewithin.

[0035] In some embodiments, pri-miRNAs, which may be incorporated into viral target sequences to create a miRNA binding site are 110 to 280 nucleobases in length. One having ordinary skill in the art will appreciate that this embodies compounds of 110, 111, 112, 113, 114, 115, 116, 117, 118, 119, 120, 121, 122, 123, 124, 125, 126, 127, 128, 129, 130, 131, 132, 133, 134, 135, 136, 137, 138, 139, 140, 141, 142, 143, 144, 145, 146, 147, 148, 149, 150, 151, 152, 153, 154, 155, 156, 157, 158, 159, 160, 161, 162, 163, 164, 165, 166, 167, 168, 169, 170, 171, 172, 173, 174, 175, 176, 177, 178, 179, 180, 181, 182, 183, 184, 185, 186, 187, 188, 189, 190, 191, 192, 193, 194, 195, 196, 197, 198, 199, 200, 201, 202, 203, 204, 205, 206, 207, 208, 209, 210, 211, 212, 213, 214, 215, 216, 217, 218, 219, 220, 221, 222, 223, 224, 225, 226, 227, 228, 229, 230, 231, 232, 233, 234, 235, 236, 237, 238, 239, 240, 241, 242, 243, 244, 245, 246, 247, 248, 249, 250, 251, 252, 253, 254, 255, 256, 257, 258, 259, 260, 261, 262, 263, 264, 265, 266, 267, 268, 269, 270, 271, 272, 273, 274, 275, 276, 277, 278, 279 or 280 nucleobases in length, or any range therewithin.

[0036] In some embodiments, pre-miRNAs, which may be incorporated into viral target sequences to create a miRNA binding site are 50 to 110 nucleobases in length. One having ordinary skill in the art will appreciate that this embodies compounds of 50, 51, 52, 53, 54, 55, 56, 57, 58, 59, 60, 61, 62, 63, 64, 65, 66, 67, 68, 69 70, 71 72, 73, 74, 75, 76, 77, 78, 79, 80, 81, 82, 83, 84, 85, 86, 87, 88, 89, 90, 91, 92, 93, 94, 95, 96, 97, 98, 99, 100, 101, 102, 103, 104, 105, 106, 107, 108, 109 or 110 nucleobases in length, or any range therewithin.

[0037] In some embodiments, pre-miRNAs, which may be incorporated into viral target sequences to create a miRNA binding site are 60 to 80 nucleobases in length. One having ordinary skill in the art will appreciate that this embodies compounds of 60, 61, 62, 63, 64, 65, 66, 67, 68, 69, 70, 71, 72, 73, 74, 75, 76, 77, 78, 79, or 80 nucleobases in length, or any range therewithin.

[0038] In some embodiments, miRNAs, which may be incorporated into viral target sequences to create a miRNA binding site are 15 to 49 nucleobases in length. One having ordinary skill in the art will appreciate that this embodies compounds of 15, 16, 17, 18, 19, 20, 21, 22, 23, 24, 25, 26, 27, 28, 29, 30, 31, 32, 33, 34, 35, 36, 37, 38, 39, 40, 41, 42, 43, 44, 45, 46, 47, 48 or 49 nucleobases in length, or any range therewithin.

[0039] In some embodiments, miRNAs, which may be incorporated into viral target sequences to create a miRNA binding site are 17 to 25 nucleobases in length. One having ordinary skill in the art will appreciate that this embodies compounds of 17, 18, 19, 20, 21, 22, 23, 24 or 25 nucleobases in length, or any range therewithin.

[0040] miRNA of human origin are of particular use in the present invention. These microRNAs, as well as their reverse complements (or sites) are listed in Table 3 below.

TABLE 3
Homo sapiens miRNA

| | | SEQ | | SEQ |
|---|---|---|---|---|
| | | ID | REVERSE COMPLMENT | ID |
| miRNA Name | miRNA (5′-3′) | NO: | (miRNA site) | NO: |
| let-7a-2-3p | CUGUACAGCCUCCUAGC | 3 | GGAAAGCUAGGAGGCUG | 4 |
| | UUUCC | | UACAG | |
| let-7a-3p | CUAUACAAUCUACUGUC | 5 | GAAAGACAGUAGAUUGU | 6 |
| | UUUC | | AUAG | |
| let-7a-5p | UGAGGUAGUAGGUUGUA | 7 | AACUAUACAACCUACUAC | 8 |
| | UAGUU | | CUCA | |
| let-7b-3p | CUAUACAACCUACUGCC | 9 | GGGAAGGCAGUAGGUUG | 10 |
| | UUCCC | | UAUAG | |
| let-7b-5p | UGAGGUAGUAGGUUGUG | 11 | AACCACACAACCUACUAC | 12 |
| | UGGUU | | CUCA | |
| let-7c | UGAGGUAGUAGGUUGUA | 13 | AACCAUACAACCUACUAC | 14 |
| | UGGUU | | CUCA | |
| let-7d-3p | CUAUACGACCUGCUGCC | 15 | AGAAAGGCAGCAGGUCGU | 16 |
| | UUUCU | | AUAG | |
| let-7d-5p | AGAGGUAGUAGGUUGCA | 17 | AACUAUGCAACCUACUAC | 18 |
| | UAGUU | | CUCU | |
| let-7e-3p | CUAUACGGCCUCCUAGC | 19 | GGAAAGCUAGGAGGCCGU | 20 |
| | UUUCC | | AUAG | |
| let-7e-5p | UGAGGUAGGAGGUUGUA | 21 | AACUAUACAACCUCCUAC | 22 |
| | UAGUU | | CUCA | |
| let-7f-1-3p | CUAUACAAUCUAUUGCC | 23 | GGGAAGGCAAUAGAUUG | 24 |
| | UUCCC | | UAUAG | |
| let-7f-2-3p | CUAUACAGUCUACUGUC | 25 | GGAAAGACAGUAGACUG | 26 |
| | UUUCC | | UAUAG | |
| let-7f-5p | UGAGGUAGUAGAUUGUA | 27 | AACUAUACAAUCUACUAC | 28 |
| | UAGUU | | CUCA | |
| let-7g-3p | CUGUACAGGCCACUGCC | 29 | GCAAGGCAGUGGCCUGUA | 30 |
| | UUGC | | CAG | |
| let-7g-5p | UGAGGUAGUAGUUUGUA | 31 | AACUGUACAAACUACUAC | 32 |
| | CAGUU | | CUCA | |
| let-7i-3p | CUGCGCAAGCUACUGCC | 33 | AGCAAGGCAGUAGCUUGC | 34 |
| | UUGCU | | GCAG | |
| let-7i-5p | UGAGGUAGUAGUUUGUG | 35 | AACAGCACAAACUACUAC | 36 |
| | CUGUU | | CUCA | |
| miR-1 | UGGAAUGUAAAGAAGUA | 37 | AUACAUACUUCUUUACAU | 38 |
| | UGUAU | | UCCA | |
| miR-100-3p | CAAGCUUGUAUCUAUAG | 39 | CAUACCUAUAGAUACAAG | 40 |
| | GUAUG | | CUUG | |
| miR-100-5p | AACCCGUAGAUCCGAAC | 41 | CACAAGUUCGGAUCUACG | 42 |
| | UUGUG | | GGUU | |
| miR-101-3p | UACAGUACUGUGAUAAC | 43 | UUCAGUUAUCACAGUACU | 44 |
| | UGAA | | GUA | |
| miR-101-5p | CAGUUAUCACAGUGCUG | 45 | AGCAUCAGCACUGUGAUA | 46 |
| | AUGCU | | ACUG | |
| miR-103a-2-5p | AGCUUCUUUACAGUGCU | 47 | CAAGGCAGCACUGUAAAG | 48 |
| | GCCUUG | | AAGCU | |
| miR-103a-3p | AGCAGCAUUGUACAGGG | 49 | UCAUAGCCCUGUACAAUG | 50 |
| | CUAUGA | | CUGCU | |
| miR-103b | UCAUAGCCCUGUACAAU | 51 | AGCAGCAUUGUACAGGGC | 52 |
| | GCUGCU | | UAUGA | |
| miR-105-3p | ACGGAUGUUUGAGCAUG | 53 | UAGCACAUGCUCAAACAU | 54 |
| | UGCUA | | CCGU | |
| miR-105-5p | UCAAAUGCUCAGACUCC | 55 | ACCACAGGAGUCUGAGCA | 56 |
| | UGUGGU | | UUUGA | |
| miR-106a-3p | CUGCAAUGUAAGCACUU | 57 | GUAAGAAGUGCUUACAU | 58 |
| | CUUAC | | UGCAG | |
| miR-106a-5p | AAAAGUGCUUACAGUGC | 59 | CUACCUGCACUGUAAGCA | 60 |
| | AGGUAG | | CUUUU | |
| miR-106b-3p | CCGCACUGUGGGUACUU | 61 | GCAGCAAGUACCCACAGU | 62 |
| | GCUGC | | GCGG | |
| miR-106b-5p | UAAAGUGCUGACAGUGC | 63 | AUCUGCACUGUCAGCACU | 64 |
| | AGAU | | UUA | |
| miR-107 | AGCAGCAUUGUACAGGG | 65 | UGAUAGCCCUGUACAAUG | 66 |
| | CUAUCA | | CUGCU | |
| miR-10a-3p | CAAAUUCGUAUCUAGGG | 67 | UAUUCCCCUAGAUACGAA | 68 |
| | GAAUA | | UUUG | |
| miR-10a-5p | UACCCUGUAGAUCCGAA | 69 | CACAAAUUCGGAUCUACA | 70 |
| | UUUGUG | | GGGUA | |
| miR-10b-3p | ACAGAUUCGAUUCUAGG | 71 | AUUCCCCUAGAAUCGAAU | 72 |
| | GGAAU | | CUGU | |
| miR-10b-5p | UACCCUGUAGAACCGAA | 73 | CACAAAUUCGGUUCUACA | 74 |
| | UUUGUG | | GGGUA | |
| miR-1178 | UUGCUCACUGUUCUUCC | 75 | CUAGGGAAGAACAGUGA | 76 |
| | CUAG | | GCAA | |
| miR-1179 | AAGCAUUCUUUCAUUGG | 77 | CCAACCAAUGAAAGAAUG | 78 |
| | UUGG | | CUU | |
| miR-1180 | UUUCCGGCUCGCGUGGG | 79 | ACACACCCACGCGAGCCG | 80 |
| | UGUGU | | GAAA | |
| miR-1181 | CCGUCGCCGCCACCCGA | 81 | CGGCUCGGGUGGCGGCGA | 82 |
| | GCCG | | CGG | |
| miR-1182 | GAGGGUCUUGGGAGGGA | 83 | GUCACAUCCCUCCCAAGA | 84 |
| | UGUGAC | | CCCUC | |
| miR-1183 | CACUGUAGGUGAUGGUG | 85 | UGCCCACUCUCACCAUCA | 86 |
| | AGAGUGGGCA | | CCUACAGUG | |
| miR-1184 | CCUGCAGCGACUUGAUG | 87 | GGAAGCCAUCAAGUCGCU | 88 |
| | GCUUCC | | GCAGG | |
| miR-1185-1-3p | AUAUACAGGGGGAGACU | 89 | AUAAGAGUCUCCCCCUGU | 90 |
| | CUUAU | | AUAU | |
| miR-1185-2-3p | AUAUACAGGGGGAGACU | 91 | AUGAGAGUCUCCCCCUGU | 92 |
| | CUCAU | | AUAU | |
| miR-1185-5p | AGAGGAUACCCUUUGUA | 93 | AACAUACAAAGGGUAUCC | 94 |
| | UGUU | | UCU | |
| miR-1193 | GGGAUGGUAGACCGGUG | 95 | GCACGUCACCGGUCUACC | 96 |
| | ACGUGC | | AUCCC | |
| miR-1197 | UAGGACACAUGGUCUAC | 97 | AGAAGUAGACCAUGUGUC | 98 |
| | UUCU | | CUA | |
| miR-1200 | CUCCUGAGCCAUUCUGA | 99 | GAGGCUCAGAAUGGCUCA | 100 |
| | GCCUC | | GGAG | |
| miR-1202 | GUGCCAGCUGCAGUGGG | 101 | CUCCCCCACUGCAGCUGG | 102 |
| | GGAG | | CAC | |
| miR-1203 | CCCGGAGCCAGGAUGCA | 103 | GAGCUGCAUCCUGGCUCC | 104 |
| | GCUC | | GGG | |
| miR-1204 | UCGUGGCCUGGUCUCCA | 105 | AUAAUGGAGACCAGGCCA | 106 |
| | UUAU | | CGA | |
| miR-1205 | UCUGCAGGGUUUGCUUU | 107 | CUCAAAGCAAACCCUGCA | 108 |
| | GAG | | GA | |
| miR-1206 | UGUUCAUGUAGAUGUUU | 109 | GCUUAAACAUCUACAUGA | 110 |
| | AAGC | | ACA | |
| miR-1207-3p | UCAGCUGGCCCUCAUUU | 111 | GAAAUGAGGGCCAGCUGA | 112 |
| | C | | | |
| miR-1207-5p | UGGCAGGGAGGCUGGGA | 113 | CCCCUCCCAGCCUCCCUG | 114 |
| | GGGG | | CCA | |
| miR-1208 | UCACUGUUCAGACAGGC | 115 | UCCGCCUGUCUGAACAGU | 116 |
| | GGA | | GA | |
| miR-122-3p | AACGCCAUUAUCACACU | 117 | UAUUUAGUGUGAUAAUG | 118 |
| | AAAUA | | GCGUU | |
| miR-122-5p | UGGAGUGUGACAAUGGU | 119 | CAAACACCAUUGUCACAC | 120 |
| | GUUUG | | UCCA | |
| miR-1224-3p | CCCCACCUCCUCUCUCCU | 121 | CUGAGGAGAGAGGAGGU | 122 |
| | CAG | | GGGG | |
| miR-1224-5p | GGAGGACUCGGGAGGU | 123 | CCACCUCCCGAGUCCUCA | 124 |
| | GG | | C | |
| miR-1225-3p | UGAGCCCCUGUGCCGCC | 125 | CUGGGGGCGGCACAGGGG | 126 |
| | CCCAG | | CUCA | |
| miR-1225-5p | GUGGGUACGGCCCAGUG | 127 | CCCCCCACUGGGCCGUAC | 128 |
| | GGGGG | | CCAC | |
| miR-1226-3p | UCACCAGCCCUGUGUUC | 129 | CUAGGGAACACAGGGCUG | 130 |
| | CCUAG | | GUGA | |
| miR-1226-5p | GUGAGGGCAUGCAGGCC | 131 | CCCCAUCCAGGCCUGCAU | 132 |
| | UGGAUGGGG | | GCCCUCAC | |
| miR-1227 | CGUGCCACCCUUUUCCC | 133 | CUGGGGAAAAGGGUGGC | 134 |
| | CAG | | ACG | |
| miR-1228-3p | UCACACCUGCCUCGCCCC | 135 | GGGGGGCGAGGCAGGUG | 136 |
| | CC | | UGA | |
| miR-1228-5p | GUGGGCGGGGGCAGGUG | 137 | CACACACCUGCCCCCGCC | 138 |
| | UGUG | | CAC | |
| miR-1229 | CUCUCACCACUGCCCUCC | 139 | CUGUGGGAGGGCAGUGG | 140 |
| | CACAG | | UGAGAG | |
| miR-1231 | GUGUCUGGGCGGACAGC | 141 | GCAGCUGUCCGCCCAGAC | 142 |
| | UGC | | AC | |
| miR-1233 | UGAGCCCUGUCCUCCCG | 143 | CUGCGGGAGGACAGGGCU | 144 |
| | CAG | | CA | |
| miR-1234 | UCGGCCUGACCACCCAC | 145 | GUGGGGUGGGUGGUCAG | 146 |
| | CCCAC | | GCCGA | |
| miR-1236 | CCUCUUCCCCUUGUCUC | 147 | CUGGAGAGACAAGGGGA | 148 |
| | UCCAG | | AGAGG | |
| miR-1237 | UCCUUCUGCUCCGUCCC | 149 | CUGGGGGACGGAGCAGAA | 150 |
| | CCAG | | GGA | |
| miR-1238 | CUUCCUCGUCUGUCUGC | 151 | GGGGCAGACAGACGAGGA | 152 |
| | CCC | | AG | |
| miR-124-3p | UAAGGCACGCGGUGAAU | 153 | GGCAUUCACCGCGUGCCU | 154 |
| | GCC | | UA | |
| miR-124-5p | CGUGUUCACAGCGGACC | 155 | AUCAAGGUCCGCUGUGAA | 156 |
| | UUGAU | | CACG | |
| miR-1243 | AACUGGAUCAAUUAUAG | 157 | CACUCCUAUAAUUGAUCC | 158 |
| | GAGUG | | AGUU | |
| miR-1244 | AAGUAGUUGGUUUGUAU | 159 | AACCAUCUCAUACAAACC | 160 |
| | GAGAUGGUU | | AACUACUU | |
| miR-1245a | AAGUGAUCUAAAGGCCU | 161 | AUGUAGGCCUUUAGAUCA | 162 |
| | ACAU | | CUU | |
| miR-1245b-3p | UCAGAUGAUCUAAAGGC | 163 | UAUAGGCCUUUAGAUCAU | 164 |
| | CUAUA | | CUGA | |
| miR-1245b-5p | UAGGCCUUUAGAUCACU | 165 | UUUAAGUGAUCUAAAGG | 166 |
| | UAAA | | CCUA | |
| miR-1246 | AAUGGAUUUUUGGAGCA | 167 | CCUGCUCCAAAAAUCCAU | 168 |
| | GG | | U | |
| miR-1247-3p | CCCCGGGAACGUCGAGA | 169 | GCUCCAGUCUCGACGUUC | 170 |
| | CUGGAGC | | CCGGGG | |
| miR-1247-5p | ACCCGUCCCGUUCGUCC | 171 | UCCGGGGACGAACGGGAC | 172 |
| | CCGGA | | GGGU | |
| miR-1248 | ACCUUCUUGUAUAAGCA | 173 | UUUAGCACAGUGCUUAUA | 174 |
| | CUGUGCUAAA | | CAAGAAGGU | |
| miR-1249 | ACGCCCUUCCCCCCCUUC | 175 | UGAAGAAGGGGGGGAAG | 176 |
| | UUCA | | GGCGU | |
| miR-1250 | ACGGUGCUGGAUGUGGC | 177 | AAAGGCCACAUCCAGCAC | 178 |
| | CUUU | | CGU | |
| miR-1251 | ACUCUAGCUGCCAAAGG | 179 | AGCGCCUUUGGCAGCUAG | 180 |
| | CGCU | | AGU | |
| miR-1252 | AGAAGGAAAUUGAAUUC | 181 | UAAAUGAAUUCAAUUUCC | 182 |
| | AUUUA | | UUCU | |
| miR-1253 | AGAGAAGAAGAUCAGCC | 183 | UGCAGGCUGAUCUUCUUC | 184 |
| | UGCA | | UCU | |
| miR-1254 | AGCCUGGAAGCUGGAGC | 185 | ACUGCAGGCUCCAGCUUC | 186 |
| | CUGCAGU | | CAGGCU | |
| miR-1255a | AGGAUGAGCAAAGAAAG | 187 | AAUCUACUUUCUUUGCUC | 188 |
| | UAGAUU | | AUCCU | |
| miR-1255b-2-3p | AACCACUUUCUUUGCUC | 189 | UGGAUGAGCAAAGAAAG | 190 |
| | AUCCA | | UGGUU | |
| miR-1255b-5p | CGGAUGAGCAAAGAAAG | 191 | AACCACUUUCUUUGCUCA | 192 |
| | UGGUU | | UCCG | |
| miR-1256 | AGGCAUUGACUUCUCAC | 193 | AGCUAGUGAGAAGUCAA | 194 |
| | UAGCU | | UGCCU | |
| miR-1257 | AGUGAAUGAUGGGUUCU | 195 | GGUCAGAACCCAUCAUUC | 196 |
| | GACC | | ACU | |
| miR-1258 | AGUUAGGAUUAGGUCGU | 197 | UUCCACGACCUAAUCCUA | 198 |
| | GGAA | | ACU | |
| miR-125a-3p | ACAGGUGAGGUUCUUGG | 199 | GGCUCCCAAGAACCUCAC | 200 |
| | GAGCC | | CUGU | |
| miR-125a-5p | UCCCUGAGACCCUUUAA | 201 | UCACAGGUUAAAGGGUCU | 202 |
| | CCUGUGA | | CAGGGA | |
| miR-125b-1-3p | ACGGGUUAGGCUCUUGG | 203 | AGCUCCCAAGAGCCUAAC | 204 |
| | GAGCU | | CCGU | |
| miR-125b-2-3p | UCACAAGUCAGGCUCUU | 205 | GUCCCAAGAGCCUGACUU | 206 |
| | GGGAC | | GUGA | |
| miR-125b-5p | UCCCUGAGACCCUAACU | 207 | UCACAAGUUAGGGUCUCA | 208 |
| | UGUGA | | GGGA | |
| miR-126-3p | UCGUACCGUGAGUAAUA | 209 | CGCAUUAUUACUCACGGU | 210 |
| | AUGCG | | ACGA | |
| miR-126-5p | CAUUAUUACUUUUGGUA | 211 | CGCGUACCAAAAGUAAUA | 212 |
| | CGCG | | AUG | |
| miR-1260a | AUCCCACCUCUGCCACC | 213 | UGGUGGCAGAGGUGGGA | 214 |
| | A | | U | |
| miR-1260b | AUCCCACCACUGCCACC | 215 | AUGGUGGCAGUGGUGGG | 216 |
| | AU | | AU | |
| miR-1261 | AUGGAUAAGGCUUUGGC | 217 | AAGCCAAAGCCUUAUCCA | 218 |
| | UU | | U | |
| miR-1262 | AUGGGUGAAUUUGUAGA | 219 | AUCCUUCUACAAAUUCAC | 220 |
| | AGGAU | | CCAU | |
| miR-1263 | AUGGUACCCUGGCAUAC | 221 | ACUCAGUAUGCCAGGGUA | 222 |
| | UGAGU | | CCAU | |
| miR-1264 | CAAGUCUUAUUUGAGCA | 223 | AACAGGUGCUCAAAUAAG | 224 |
| | CCUGUU | | ACUUG | |
| miR-1265 | CAGGAUGUGGUCAAGUG | 225 | AACAACACUUGACCACAU | 226 |
| | UUGUU | | CCUG | |
| miR-1266 | CCUCAGGGCUGUAGAAC | 227 | AGCCCUGUUCUACAGCCC | 228 |
| | AGGGCU | | UGAGG | |
| miR-1267 | CCUGUUGAAGUGUAAUC | 229 | UGGGGAUUACACUUCAAC | 230 |
| | CCCA | | AGG | |
| miR-1268a | CGGGCGUGGUGGUGGGG | 231 | CCCCCACCACCACGCCCG | 232 |
| | G | | | |
| miR-1268b | CGGGCGUGGUGGUGGGG | 233 | CACCCCCACCACCACGCC | 234 |
| | GUG | | CG | |
| miR-1269a | CUGGACUGAGCCGUGCU | 235 | CCAGUAGCACGGCUCAGU | 236 |
| | ACUGG | | CCAG | |
| miR-1269b | CUGGACUGAGCCAUGCU | 237 | CCAGUAGCAUGGCUCAGU | 238 |
| | ACUGG | | CCAG | |
| miR-127-3p | UCGGAUCCGUCUGAGCU | 239 | AGCCAAGCUCAGACGGAU | 240 |
| | UGGCU | | CCGA | |
| miR-127-5p | CUGAAGCUCAGAGGGCU | 241 | AUCAGAGCCCUCUGAGCU | 242 |
| | CUGAU | | UCAG | |
| miR-1270 | CUGGAGAUAUGGAAGAG | 243 | ACACAGCUCUUCCAUAUC | 244 |
| | CUGUGU | | UCCAG | |
| miR-1271-3p | AGUGCCUGCUAUGUGCC | 245 | UGCCUGGCACAUAGCAGG | 246 |
| | AGGCA | | CACU | |
| miR-1271-5p | CUUGGCACCUAGCAAGC | 247 | UGAGUGCUUGCUAGGUGC | 248 |
| | ACUCA | | CAAG | |
| miR-1272 | GAUGAUGAUGGCAGCAA | 249 | UUUCAGAAUUUGCUGCCA | 250 |
| | AUUCUGAAA | | UCAUCAUC | |
| miR-1273a | GGGCGACAAAGCAAGAC | 251 | AAGAAAGAGUCUUGCUU | 252 |
| | UCUUUCUU | | UGUCGCCC | |
| miR-1273c | GGCGACAAAACGAGACC | 253 | GACAGGGUCUCGUUUUGU | 254 |
| | CUGUC | | CGCC | |
| miR-1273d | GAACCCAUGAGGUUGAG | 255 | ACUGCAGCCUCAACCUCA | 256 |
| | GCUGCAGU | | UGGGUUC | |
| miR-1273e | UUGCUUGAACCCAGGAA | 257 | UCCACUUCCUGGGUUCAA | 258 |
| | GUGGA | | GCAA | |
| miR-1273f | GGAGAUGGAGGUUGCAG | 259 | CACUGCAACCUCCAUCUC | 260 |
| | UG | | C | |
| miR-1273g-3p | ACCACUGCACUCCAGCC | 261 | CUCAGGCUGGAGUGCAGU | 262 |
| | UGAG | | GGU | |
| miR-1273g-5p | GGUGGUUGAGGCUGCAG | 263 | ACUUACUGCAGCCUCAAC | 264 |
| | UAAGU | | CACC | |
| miR-1275 | GUGGGGGAGAGGCUGUC | 265 | GACAGCCUCUCCCCCAC | 266 |
| miR-1276 | UAAAGAGCCCUGUGGAG | 267 | UGUCUCCACAGGGCUCUU | 268 |
| | ACA | | UA | |
| miR-1277-3p | UACGUAGAUAUAUAUGU | 269 | AAAAUACAUAUAUAUCU | 270 |
| | AUUUU | | ACGUA | |
| miR-1277-5p | AAAUAUAUAUAUAUAUG | 271 | AUACGUACAUAUAUAUA | 272 |
| | UACGUAU | | UAUAUUU | |
| miR-1278 | UAGUACUGUGCAUAUCA | 273 | AUAGAUGAUAUGCACAG | 274 |
| | UCUAU | | UACUA | |
| miR-1279 | UCAUAUUGCUUCUUUCU | 275 | AGAAAGAAGCAAUAUGA | 276 |
| miR-128 | UCACAGUGAACCGGUCU | 277 | AAAGAGACCGGUUCACUG | 278 |
| | CUUU | | UGA | |
| miR-1280 | UCCCACCGCUGCCACCC | 279 | GGGUGGCAGCGGUGGGA | 280 |
| miR-1281 | UCGCCUCCUCCUCUCCC | 281 | GGGAGAGGAGGAGGCGA | 282 |
| miR-1282 | UCGUUUGCCUUUUUCUG | 283 | AAGCAGAAAAAGGCAAAC | 284 |
| | CUU | | GA | |
| miR-1283 | UCUACAAAGGAAAGCGC | 285 | AGAAAGCGCUUUCCUUUG | 286 |
| | UUUCU | | UAGA | |
| miR-1284 | UCUAUACAGACCCUGGC | 287 | GAAAAGCCAGGGUCUGUA | 288 |
| | UUUUC | | UAGA | |
| miR-1285-3p | UCUGGGCAACAAAGUGA | 289 | AGGUCUCACUUUGUUGCC | 290 |
| | GACCU | | CAGA | |
| miR-1285-5p | GAUCUCACUUUGUUGCC | 291 | CCUGGGCAACAAAGUGAG | 292 |
| | CAGG | | AUC | |
| miR-1286 | UGCAGGACCAAGAUGAG | 293 | AGGGCUCAUCUUGGUCCU | 294 |
| | CCCU | | GCA | |
| miR-1287 | UGCUGGAUCAGUGGUUC | 295 | GACUCGAACCACUGAUCC | 296 |
| | GAGUC | | AGCA | |
| miR-1288 | UGGACUGCCCUGAUCUG | 297 | UCUCCAGAUCAGGGCAGU | 298 |
| | GAGA | | CCA | |
| miR-1289 | UGGAGUCCAGGAAUCUG | 299 | AAAAUGCAGAUUCCUGGA | 300 |
| | CAUUUU | | CUCCA | |
| miR-129-1-3p | AAGCCCUUACCCCAAAA | 301 | AUACUUUUUGGGGUAAG | 302 |
| | AGUAU | | GGCUU | |
| miR-129-2-3p | AAGCCCUUACCCCAAAA | 303 | AUGCUUUUUGGGGUAAG | 304 |
| | AGCAU | | GGCUU | |
| miR-129-5p | CUUUUUGCGGUCUGGGC | 305 | GCAAGCCCAGACCGCAAA | 306 |
| | UUGC | | AAG | |
| miR-1290 | UGGAUUUUUGGAUCAGG | 307 | UCCCUGAUCCAAAAAUCC | 308 |
| | GA | | A | |
| miR-1291 | UGGCCCUGACUGAAGAC | 309 | ACUGCUGGUCUUCAGUCA | 310 |
| | CAGCAGU | | GGGCCA | |
| miR-1292 | UGGGAACGGGUUCCGGC | 311 | CAGCGUCUGCCGGAACCC | 312 |
| | AGACGCUG | | GUUCCCA | |
| miR-1293 | UGGGUGGUCUGGAGAUU | 313 | GCACAAAUCUCCAGACCA | 314 |
| | UGUGC | | CCCA | |
| miR-1294 | UGUGAGGUUGGCAUUGU | 315 | AGACAACAAUGCCAACCU | 316 |
| | UGUCU | | CACA | |
| miR-1295a | UUAGGCCGCAGAUCUGG | 317 | UCACCCAGAUCUGCGGCC | 318 |
| | GUGA | | UAA | |
| miR-1295b-3p | AAUAGGCCACGGAUCUG | 319 | UUGCCCAGAUCCGUGGCC | 320 |
| | GGCAA | | UAUU | |
| miR-1295b-5p | CACCCAGAUCUGCGGCC | 321 | AUUAGGCCGCAGAUCUGG | 322 |
| | UAAU | | GUG | |
| miR-1296 | UUAGGGCCCUGGCUCCA | 323 | GGAGAUGGAGCCAGGGCC | 324 |
| | UCUCC | | CUAA | |
| miR-1297 | UUCAAGUAAUUCAGGUG | 325 | CACCUGAAUUACUUGAA | 326 |
| miR-1298 | UUCAUUCGGCUGUCCAG | 327 | UACAUCUGGACAGCCGAA | 328 |
| | AUGUA | | UGAA | |
| miR-1299 | UUCUGGAAUUCUGUGUG | 329 | UCCCUCACACAGAAUUCC | 330 |
| | AGGGA | | AGAA | |
| miR-1301 | UUGCAGCUGCCUGGGAG | 331 | GAAGUCACUCCCAGGCAG | 332 |
| | UGACUUC | | CUGCAA | |
| miR-1302 | UUGGGACAUACUUAUGC | 333 | UUUAGCAUAAGUAUGUCC | 334 |
| | UAAA | | CAA | |
| miR-1303 | UUUAGAGACGGGGUCUU | 335 | AGAGCAAGACCCCGUCUC | 336 |
| | GCUCU | | UAAA | |
| miR-1304-3p | UCUCACUGUAGCCUCGA | 337 | GGGGUUCGAGGCUACAGU | 338 |
| | ACCCC | | GAGA | |
| miR-1304-5p | UUUGAGGCUACAGUGAG | 339 | CACAUCUCACUGUAGCCU | 340 |
| | AUGUG | | CAAA | |
| miR-1305 | UUUUCAACUCUAAUGGG | 341 | UCUCUCCCAUUAGAGUUG | 342 |
| | AGAGA | | AAAA | |
| miR-1306-3p | ACGUUGGCUCUGGUGGU | 343 | CACCACCAGAGCCAACGU | 344 |
| | G | | | |
| miR-1306-5p | CCACCUCCCCUGCAAAC | 345 | UGGACGUUUGCAGGGGA | 346 |
| | GUCCA | | GGUGG | |
| miR-1307-3p | ACUCGGCGUGGCGUCGG | 347 | CACGACCGACGCCACGCC | 348 |
| | UCGUG | | GAGU | |
| miR-1307-5p | UCGACCGGACCUCGACC | 349 | AGCCGGUCGAGGUCCGGU | 350 |
| | GGCU | | CGA | |
| miR-130a-3p | CAGUGCAAUGUUAAAAG | 351 | AUGCCCUUUUAACAUUGC | 352 |
| | GGCAU | | ACUG | |
| miR-130a-5p | UUCACAUUGUGCUACUG | 353 | GCAGACAGUAGCACAAUG | 354 |
| | UCUGC | | UGAA | |
| miR-130b-3p | CAGUGCAAUGAUGAAAG | 355 | AUGCCCUUUCAUCAUUGC | 356 |
| | GGCAU | | ACUG | |
| miR-130b-5p | ACUCUUUCCCUGUUGCA | 357 | GUAGUGCAACAGGGAAA | 358 |
| | CUAC | | GAGU | |
| miR-132-3p | UAACAGUCUACAGCCAU | 359 | CGACCAUGGCUGUAGACU | 360 |
| | GGUCG | | GUUA | |
| miR-132-5p | ACCGUGGCUUUCGAUUG | 361 | AGUAACAAUCGAAAGCCA | 362 |
| | UUACU | | CGGU | |
| miR-1321 | CAGGGAGGUGAAUGUGA | 363 | AUCACAUUCACCUCCCUG | 364 |
| | U | | | |
| miR-1322 | GAUGAUGCUGCUGAUGC | 365 | CAGCAUCAGCAGCAUCAU | 366 |
| | UG | | C | |
| miR-1323 | UCAAAACUGAGGGGCAU | 367 | AGAAAAUGCCCCUCAGUU | 368 |
| | UUUCU | | UUGA | |
| miR-1324 | CCAGACAGAAUUCUAUG | 369 | GAAAGUGCAUAGAAUUC | 370 |
| | CACUUUC | | UGUCUGG | |
| miR-133a | UUUGGUCCCCUUCAACC | 371 | CAGCUGGUUGAAGGGGAC | 372 |
| | AGCUG | | CAAA | |
| miR-133b | UUUGGUCCCCUUCAACC | 373 | UAGCUGGUUGAAGGGGA | 374 |
| | AGCUA | | CCAAA | |
| miR-134 | UGUGACUGGUUGACCAG | 375 | CCCCUCUGGUCAACCAGU | 376 |
| | AGGGG | | CACA | |
| miR-1343 | CUCCUGGGGCCCGCACU | 377 | GCGAGAGUGCGGGCCCCA | 378 |
| | CUCGC | | GGAG | |
| miR-135a-3p | UAUAGGGAUUGGAGCCG | 379 | CGCCACGGCUCCAAUCCC | 380 |
| | UGGCG | | UAUA | |
| miR-135a-5p | UAUGGCUUUUUAUUCCU | 381 | UCACAUAGGAAUAAAAA | 382 |
| | AUGUGA | | GCCAUA | |
| miR-135b-3p | AUGUAGGGCUAAAAGCC | 383 | CCCAUGGCUUUUAGCCCU | 384 |
| | AUGGG | | ACAU | |
| miR-135b-5p | UAUGGCUUUUCAUUCCU | 385 | UCACAUAGGAAUGAAAA | 386 |
| | AUGUGA | | GCCAUA | |
| miR-136-3p | CAUCAUCGUCUCAAAUG | 387 | AGACUCAUUUGAGACGAU | 388 |
| | AGUCU | | GAUG | |
| miR-136-5p | ACUCCAUUUGUUUUGAU | 389 | UCCAUCAUCAAAACAAAU | 390 |
| | GAUGGA | | GGAGU | |
| miR-137 | UUAUUGCUUAAGAAUAC | 391 | CUACGCGUAUUCUUAAGC | 392 |
| | GCGUAG | | AAUAA | |
| miR-138-1-3p | GCUACUUCACAACACCA | 393 | GGCCCUGGUGUUGUGAAG | 394 |
| | GGGCC | | UAGC | |
| miR-138-2-3p | GCUAUUUCACGACACCA | 395 | AACCCUGGUGUCGUGAAA | 396 |
| | GGGUU | | UAGC | |
| miR-138-5p | AGCUGGUGUUGUGAAUC | 397 | CGGCCUGAUUCACAACAC | 398 |
| | AGGCCG | | CAGCU | |
| miR-139-3p | GGAGACGCGGCCCUGUU | 399 | ACUCCAACAGGGCCGCGU | 400 |
| | GGAGU | | CUCC | |
| miR-139-5p | UCUACAGUGCACGUGUC | 401 | CUGGAGACACGUGCACUG | 402 |
| | UCCAG | | UAGA | |
| miR-140-3p | UACCACAGGGUAGAACC | 403 | CCGUGGUUCUACCCUGUG | 404 |
| | ACGG | | GUA | |
| miR-140-5p | CAGUGGUUUUACCCUAU | 405 | CUACCAUAGGGUAAAACC | 406 |
| | GGUAG | | ACUG | |
| miR-141-3p | UAACACUGUCUGGUAAA | 407 | CCAUCUUUACCAGACAGU | 408 |
| | GAUGG | | GUUA | |
| miR-141-5p | CAUCUUCCAGUACAGUG | 409 | UCCAACACUGUACUGGAA | 410 |
| | UUGGA | | GAUG | |
| miR-142-3p | UGUAGUGUUUCCUACUU | 411 | UCCAUAAAGUAGGAAACA | 412 |
| | UAUGGA | | CUACA | |
| miR-142-5p | CAUAAAGUAGAAAGCAC | 413 | AGUAGUGCUUUCUACUUU | 414 |
| | UACU | | AUG | |
| miR-143-3p | UGAGAUGAAGCACUGUA | 415 | GAGCUACAGUGCUUCAUC | 416 |
| | GCUC | | UCA | |
| miR-143-5p | GGUGCAGUGCUGCAUCU | 417 | ACCAGAGAUGCAGCACUG | 418 |
| | CUGGU | | CACC | |
| miR-144-3p | UACAGUAUAGAUGAUGU | 419 | AGUACAUCAUCUAUACUG | 420 |
| | ACU | | UA | |
| miR-144-5p | GGAUAUCAUCAUAUACU | 421 | CUUACAGUAUAUGAUGA | 422 |
| | GUAAG | | UAUCC | |
| miR-145-3p | GGAUUCCUGGAAAUACU | 423 | AGAACAGUAUUUCCAGGA | 424 |
| | GUUCU | | AUCC | |
| miR-145-5p | GUCCAGUUUUCCCAGGA | 425 | AGGGAUUCCUGGGAAAAC | 426 |
| | AUCCCU | | UGGAC | |
| miR-1468 | CUCCGUUUGCCUGUUUC | 427 | CAGCGAAACAGGCAAACG | 428 |
| | GCUG | | GAG | |
| miR-1469 | CUCGGCGCGGGGCGCGG | 429 | GGAGCCCGCGCCCCGCGC | 430 |
| | GCUCC | | CGAG | |
| miR-146a-3p | CCUCUGAAAUUCAGUUC | 431 | CUGAAGAACUGAAUUUCA | 432 |
| | UUCAG | | GAGG | |
| miR-146a-5p | UGAGAACUGAAUUCCAU | 433 | AACCCAUGGAAUUCAGUU | 434 |
| | GGGUU | | CUCA | |
| miR-146b-3p | UGCCCUGUGGACUCAGU | 435 | CCAGAACUGAGUCCACAG | 436 |
| | UCUGG | | GGCA | |
| miR-146b-5p | UGAGAACUGAAUUCCAU | 437 | AGCCUAUGGAAUUCAGUU | 438 |
| | AGGCU | | CUCA | |
| miR-1470 | GCCCUCCGCCCGUGCACC | 439 | CGGGGUGCACGGGCGGAG | 440 |
| | CCG | | GGC | |
| miR-1471 | GCCCGCGUGUGGAGCCA | 441 | ACACCUGGCUCCACACGC | 442 |
| | GGUGU | | GGGC | |
| miR-147a | GUGUGUGGAAAUGCUUC | 443 | GCAGAAGCAUUUCCACAC | 444 |
| | UGC | | AC | |
| miR-147b | GUGUGCGGAAAUGCUUC | 445 | UAGCAGAAGCAUUUCCGC | 446 |
| | UGCUA | | ACAC | |
| miR-148a-3p | UCAGUGCACUACAGAAC | 447 | ACAAAGUUCUGUAGUGCA | 448 |
| | UUUGU | | CUGA | |
| miR-148a-5p | AAAGUUCUGAGACACUC | 449 | AGUCGGAGUGUCUCAGAA | 450 |
| | CGUU | | CUUU | |
| miR-148b-3p | UCAGUGCAUCACAGAAC | 451 | ACAAAGUUCUGUGAUGCA | 452 |
| | UUUGU | | CUGA | |
| miR-148b-5p | AAGUUCUGUUAUACACU | 453 | GCCUGAGUGUAUAACAGA | 454 |
| | CAGGC | | ACUU | |
| miR-149-3p | AGGGAGGGACGGGGGCU | 455 | GCACAGCCCCCGUCCCUC | 456 |
| | GUGC | | CCU | |
| miR-149-5p | UCUGGCUCCGUGUCUUC | 457 | GGGAGUGAAGACACGGA | 458 |
| | ACUCCC | | GCCAGA | |
| miR-150-3p | CUGGUACAGGCCUGGGG | 459 | CUGUCCCCCAGGCCUGUA | 460 |
| | GACAG | | CCAG | |
| miR-150-5p | UCUCCCAACCCUUGUAC | 461 | CACUGGUACAAGGGUUGG | 462 |
| | CAGUG | | GAGA | |
| miR-151a-3p | CUAGACUGAAGCUCCUU | 463 | CCUCAAGGAGCUUCAGUC | 464 |
| | GAGG | | UAG | |
| miR-151a-5p | UCGAGGAGCUCACAGUC | 465 | ACUAGACUGUGAGCUCCU | 466 |
| | UAGU | | CGA | |
| miR-151b | UCGAGGAGCUCACAGUC | 467 | AGACUGUGAGCUCCUCGA | 468 |
| | U | | | |
| miR-152 | UCAGUGCAUGACAGAAC | 469 | CCAAGUUCUGUCAUGCAC | 470 |
| | UUGG | | UGA | |
| miR-153 | UUGCAUAGUCACAAAAG | 471 | GAUCACUUUUGUGACUAU | 472 |
| | UGAUC | | GCAA | |
| miR-1537 | AAAACCGUCUAGUUACA | 473 | ACAACUGUAACUAGACGG | 474 |
| | GUUGU | | UUUU | |
| miR-1538 | CGGCCCGGGCUGCUGCU | 475 | AGGAACAGCAGCAGCCCG | 476 |
| | GUUCCU | | GGCCG | |
| miR-1539 | UCCUGCGCGUCCCAGAU | 477 | GGGCAUCUGGGACGCGCA | 478 |
| | GCCC | | GGA | |
| miR-154-3p | AAUCAUACACGGUUGAC | 479 | AAUAGGUCAACCGUGUAU | 480 |
| | CUAUU | | GAUU | |
| miR-154-5p | UAGGUUAUCCGUGUUGC | 481 | CGAAGGCAACACGGAUAA | 482 |
| | CUUCG | | CCUA | |
| miR-155-3p | CUCCUACAUAUUAGCAU | 483 | UGUUAAUGCUAAUAUGU | 484 |
| | UAACA | | AGGAG | |
| miR-155-5p | UUAAUGCUAAUCGUGAU | 485 | ACCCCUAUCACGAUUAGC | 486 |
| | AGGGGU | | AUUAA | |
| miR-1587 | UUGGGCUGGGCUGGGUU | 487 | CCCAACCCAGCCCAGCCC | 488 |
| | GGG | | AA | |
| miR-15a-3p | CAGGCCAUAUUGUGCUG | 489 | UGAGGCAGCACAAUAUGG | 490 |
| | CCUCA | | CCUG | |
| miR-15a-5p | UAGCAGCACAUAAUGGU | 491 | CACAAACCAUUAUGUGCU | 492 |
| | UUGUG | | GCUA | |
| miR-15b-3p | CGAAUCAUUAUUUGCUG | 493 | UAGAGCAGCAAAUAAUG | 494 |
| | CUCUA | | AUUCG | |
| miR-15b-5p | UAGCAGCACAUCAUGGU | 495 | UGUAAACCAUGAUGUGCU | 496 |
| | UUACA | | GCUA | |
| miR-16-1-3p | CCAGUAUUAACUGUGCU | 497 | UCAGCAGCACAGUUAAUA | 498 |
| | GCUGA | | CUGG | |
| miR-16-2-3p | CCAAUAUUACUGUGCUG | 499 | UAAAGCAGCACAGUAAUA | 500 |
| | CUUUA | | UUGG | |
| miR-16-5p | UAGCAGCACGUAAAUAU | 501 | CGCCAAUAUUUACGUGCU | 502 |
| | UGGCG | | GCUA | |
| miR-17-3p | ACUGCAGUGAAGGCACU | 503 | CUACAAGUGCCUUCACUG | 504 |
| | UGUAG | | CAGU | |
| miR-17-5p | CAAAGUGCUUACAGUGC | 505 | CUACCUGCACUGUAAGCA | 506 |
| | AGGUAG | | CUUUG | |
| miR-181a-2-3p | ACCACUGACCGUUGACU | 507 | GGUACAGUCAACGGUCAG | 508 |
| | GUACC | | UGGU | |
| miR-181a-3p | ACCAUCGACCGUUGAUU | 509 | GGUACAAUCAACGGUCGA | 510 |
| | GUACC | | UGGU | |
| miR-181a-5p | AACAUUCAACGCUGUCG | 511 | ACUCACCGACAGCGUUGA | 512 |
| | GUGAGU | | AUGUU | |
| miR-181b-3p | CUCACUGAACAAUGAAU | 513 | UUGCAUUCAUUGUUCAGU | 514 |
| | GCAA | | GAG | |
| miR-181b-5p | AACAUUCAUUGCUGUCG | 515 | ACCCACCGACAGCAAUGA | 516 |
| | GUGGGU | | AUGUU | |
| miR-181c-3p | AACCAUCGACCGUUGAG | 517 | GUCCACUCAACGGUCGAU | 518 |
| | UGGAC | | GGUU | |
| miR-181c-5p | AACAUUCAACCUGUCGG | 519 | ACUCACCGACAGGUUGAA | 520 |
| | UGAGU | | UGUU | |
| miR-181d | AACAUUCAUUGUUGUCG | 521 | ACCCACCGACAACAAUGA | 522 |
| | GUGGGU | | AUGUU | |
| miR-182-3p | UGGUUCUAGACUUGCCA | 523 | UAGUUGGCAAGUCUAGA | 524 |
| | ACUA | | ACCA | |
| miR-182-5p | UUUGGCAAUGGUAGAAC | 525 | AGUGUGAGUUCUACCAUU | 526 |
| | UCACACU | | GCCAAA | |
| miR-1825 | UCCAGUGCCCUCCUCUC | 527 | GGAGAGGAGGGCACUGG | 528 |
| | C | | A | |
| miR-1827 | UGAGGCAGUAGAUUGAA | 529 | AUUCAAUCUACUGCCUCA | 530 |
| | U | | | |
| miR-183-3p | GUGAAUUACCGAAGGGC | 531 | UUAUGGCCCUUCGGUAAU | 532 |
| | CAUAA | | UCAC | |
| miR-183-5p | UAUGGCACUGGUAGAAU | 533 | AGUGAAUUCUACCAGUGC | 534 |
| | UCACU | | CAUA | |
| miR-184 | UGGACGGAGAACUGAUA | 535 | ACCCUUAUCAGUUCUCCG | 536 |
| | AGGGU | | UCCA | |
| miR-185-3p | AGGGGCUGGCUUUCCUC | 537 | GACCAGAGGAAAGCCAGC | 538 |
| | UGGUC | | CCCU | |
| miR-185-5p | UGGAGAGAAAGGCAGUU | 539 | UCAGGAACUGCCUUUCUC | 540 |
| | CCUGA | | UCCA | |
| miR-186-3p | GCCCAAAGGUGAAUUUU | 541 | CCCAAAAAAUUCACCUUU | 542 |
| | UUGGG | | GGGC | |
| miR-186-5p | CAAAGAAUUCUCCUUUU | 543 | AGCCCAAAAGGAGAAUUC | 544 |
| | GGGCU | | UUUG | |
| miR-187-3p | UCGUGUCUUGUGUUGCA | 545 | CCGGCUGCAACACAAGAC | 546 |
| | GCCGG | | ACGA | |
| miR-187-5p | GGCUACAACACAGGACC | 547 | GCCCGGGUCCUGUGUUGU | 548 |
| | CGGGC | | AGCC | |
| miR-188-3p | CUCCCACAUGCAGGGUU | 549 | UGCAAACCCUGCAUGUGG | 550 |
| | UGCA | | GAG | |
| miR-188-5p | CAUCCCUUGCAUGGUGG | 551 | CCCUCCACCAUGCAAGGG | 552 |
| | AGGG | | AUG | |
| miR-18a-3p | ACUGCCCUAAGUGCUCC | 553 | CCAGAAGGAGCACUUAGG | 554 |
| | UUCUGG | | GCAGU | |
| miR-18a-5p | UAAGGUGCAUCUAGUGC | 555 | CUAUCUGCACUAGAUGCA | 556 |
| | AGAUAG | | CCUUA | |
| miR-18b-3p | UGCCCUAAAUGCCCCUU | 557 | GCCAGAAGGGGCAUUUAG | 558 |
| | CUGGC | | GGCA | |
| miR-18b-5p | UAAGGUGCAUCUAGUGC | 559 | CUAACUGCACUAGAUGCA | 560 |
| | AGUUAG | | CCUUA | |
| miR-1908 | CGGCGGGGACGGCGAUU | 561 | GACCAAUCGCCGUCCCCG | 562 |
| | GGUC | | CCG | |
| miR-1909-3p | CGCAGGGGCCGGGUGCU | 563 | CGGUGAGCACCCGGCCCC | 564 |
| | CACCG | | UGCG | |
| miR-1909-5p | UGAGUGCCGGUGCCUGC | 565 | CAGGGCAGGCACCGGCAC | 566 |
| | CCUG | | UCA | |
| miR-190a | UGAUAUGUUUGAUAUAU | 567 | ACCUAAUAUAUCAAACAU | 568 |
| | UAGGU | | AUCA | |
| miR-190b | UGAUAUGUUUGAUAUUG | 569 | AACCCAAUAUCAAACAUA | 570 |
| | GGUU | | UCA | |
| miR-191-3p | GCUGCGCUUGGAUUUCG | 571 | GGGGACGAAAUCCAAGCG | 572 |
| | UCCCC | | CAGC | |
| miR-191-5p | CAACGGAAUCCCAAAAG | 573 | CAGCUGCUUUUGGGAUUC | 574 |
| | CAGCUG | | CGUUG | |
| miR-1910 | CCAGUCCUGUGCCUGCC | 575 | AGGCGGCAGGCACAGGAC | 576 |
| | GCCU | | UGG | |
| miR-1911-3p | CACCAGGCAUUGUGGUC | 577 | GGAGACCACAAUGCCUGG | 578 |
| | UCC | | UG | |
| miR-1911-5p | UGAGUACCGCCAUGUCU | 579 | CCCAACAGACAUGGCGGU | 580 |
| | GUUGGG | | ACUCA | |
| miR-1912 | UACCCAGAGCAUGCAGU | 581 | UUCACACUGCAUGCUCUG | 582 |
| | GUGAA | | GGUA | |
| miR-1913 | UCUGCCCCCUCCGCUGC | 583 | UGGCAGCAGCGGAGGGGG | 584 |
| | UGCCA | | CAGA | |
| miR-1914-3p | GGAGGGGUCCCGCACUG | 585 | CCUCCCAGUGCGGGACCC | 586 |
| | GGAGG | | CUCC | |
| miR-1914-5p | CCCUGUGCCCGGCCCAC | 587 | CAGAAGUGGGCCGGGCAC | 588 |
| | UUCUG | | AGGG | |
| miR-1915-3p | CCCCAGGGCGACGCGGC | 589 | CCCGCCGCGTCGCCCTGG | 590 |
| | GGG | | GG | |
| miR-1915-5p | ACCUUGCCUUGCUGCCC | 591 | GGCCCGGGCAGCAAGGCA | 592 |
| | GGGCC | | AGGU | |
| miR-192-3p | CUGCCAAUUCCAUAGGU | 593 | CUGUGACCUAUGGAAUUG | 594 |
| | CACAG | | GCAG | |
| miR-192-5p | CUGACCUAUGAAUUGAC | 595 | GGCUGUCAAUUCAUAGGU | 596 |
| | AGCC | | CAG | |
| miR-193a-3p | AACUGGCCUACAAAGUC | 597 | ACUGGGACUUUGUAGGCC | 598 |
| | CCAGU | | AGUU | |
| miR-193a-5p | UGGGUCUUUGCGGGCGA | 599 | UCAUCUCGCCCGCAAAGA | 600 |
| | GAUGA | | CCCA | |
| miR-193b-3p | AACUGGCCCUCAAAGUC | 601 | AGCGGGACUUUGAGGGCC | 602 |
| | CCGCU | | AGUU | |
| miR-193b-5p | CGGGGUUUUGAGGGCGA | 603 | UCAUCUCGCCCUCAAAAC | 604 |
| | GAUGA | | CCCG | |
| miR-194-3p | CCAGUGGGGCUGCUGUU | 605 | CAGAUAACAGCAGCCCCA | 606 |
| | AUCUG | | CUGG | |
| miR-194-5p | UGUAACAGCAACUCCAU | 607 | UCCACAUGGAGUUGCUGU | 608 |
| | GUGGA | | UACA | |
| miR-195-3p | CCAAUAUUGGCUGUGCU | 609 | GGAGCAGCACAGCCAAUA | 610 |
| | GCUCC | | UUGG | |
| miR-195-5p | UAGCAGCACAGAAAUAU | 611 | GCCAAUAUUUCUGUGCUG | 612 |
| | UGGC | | CUA | |
| miR-196a-3p | CGGCAACAAGAAACUGC | 613 | CUCAGGCAGUUUCUUGUU | 614 |
| | CUGAG | | GCCG | |
| miR-196a-5p | UAGGUAGUUUCAUGUUG | 615 | CCCAACAACAUGAAACUA | 616 |
| | UUGGG | | CCUA | |
| miR-196b-3p | UCGACAGCACGACACUG | 617 | GAAGGCAGUGUCGUGCUG | 618 |
| | CCUUC | | UCGA | |
| miR-196b-5p | UAGGUAGUUUCCUGUUG | 619 | CCCAACAACAGGAAACUA | 620 |
| | UUGGG | | CCUA | |
| miR-197-3p | UUCACCACCUUCUCCAC | 621 | GCUGGGUGGAGAAGGUG | 622 |
| | CCAGC | | GUGAA | |
| miR-197-5p | CGGGUAGAGAGGGCAGU | 623 | CCUCCCACUGCCCUCUCU | 624 |
| | GGGAGG | | ACCCG | |
| miR-1972 | UCAGGCCAGGCACAGUG | 625 | UGAGCCACUGUGCCUGGC | 626 |
| | GCUCA | | CUGA | |
| miR-1973 | ACCGUGCAAAGGUAGCAA | 627 | UAUGCUACCUUUGCACGG | 628 |
| | U | | U | |
| miR-1976 | CCUCCUGCCCUCCUUGC | 629 | ACAGCAAGGAGGGCAGGA | 630 |
| | UGU | | GG | |
| miR-198 | GGUCCAGAGGGGAGAUA | 631 | GAACCUAUCUCCCCUCUG | 632 |
| | GGUUC | | GACC | |
| miR-199a-3p | ACAGUAGUCUGCACAUU | 633 | UAACCAAUGUGCAGACUA | 634 |
| | GGUUA | | CUGU | |
| miR-199a-5p | CCCAGUGUUCAGACUAC | 635 | GAACAGGUAGUCUGAACA | 636 |
| | CUGUUC | | CUGGG | |
| miR-199b-3p | ACAGUAGUCUGCACAUU | 637 | UAACCAAUGUGCAGACUA | 638 |
| | GGUUA | | CUGU | |
| miR-199b-5p | CCCAGUGUUUAGACUAU | 639 | GAACAGAUAGUCUAAACA | 640 |
| | CUGUUC | | CUGGG | |
| miR-19a-3p | UGUGCAAAUCUAUGCAA | 641 | UCAGUUUUGCAUAGAUU | 642 |
| | AACUGA | | UGCACA | |
| miR-19a-5p | AGUUUUGCAUAGUUGCA | 643 | UGUAGUGCAACUAUGCAA | 644 |
| | CUACA | | AACU | |
| miR-19b-1-5p | AGUUUUGCAGGUUUGCA | 645 | GCUGGAUGCAAACCUGCA | 646 |
| | UCCAGC | | AAACU | |
| miR-19b-2-5p | AGUUUUGCAGGUUUGCA | 647 | UGAAAUGCAAACCUGCAA | 648 |
| | UUUCA | | AACU | |
| miR-19b-3p | UGUGCAAAUCCAUGCAA | 649 | UCAGUUUUGCAUGGAUU | 650 |
| | AACUGA | | UGCACA | |
| miR-200a-3p | UAACACUGUCUGGUAAC | 651 | ACAUCGUUACCAGACAGU | 652 |
| | GAUGU | | GUUA | |
| miR-200a-5p | CAUCUUACCGGACAGUG | 653 | UCCAGCACUGUCCGGUAA | 654 |
| | CUGGA | | GAUG | |
| miR-200b-3p | UAAUACUGCCUGGUAAU | 655 | UCAUCAUUACCAGGCAGU | 656 |
| | GAUGA | | AUUA | |
| miR-200b-5p | CAUCUUACUGGGCAGCA | 657 | UCCAAUGCUGCCCAGUAA | 658 |
| | UUGGA | | GAUG | |
| miR-200c-3p | UAAUACUGCCGGGUAAU | 659 | UCCAUCAUUACCCGGCAG | 660 |
| | GAUGGA | | UAUUA | |
| miR-200c-5p | CGUCUUACCCAGCAGUG | 661 | CCAAACACUGCUGGGUAA | 662 |
| | UUUGG | | GACG | |
| miR-202-3p | AGAGGUAUAGGGCAUGG | 663 | UUCCCAUGCCCUAUACCU | 664 |
| | GAA | | CU | |
| miR-202-5p | UUCCUAUGCAUAUACUU | 665 | CAAAGAAGUAUAUGCAU | 666 |
| | CUUUG | | AGGAA | |
| miR-203 | GUGAAAUGUUUAGGACC | 667 | CUAGUGGUCCUAAACAUU | 668 |
| | ACUAG | | UCAC | |
| miR-204-3p | GCUGGGAAGGCAAAGGG | 669 | ACGUCCCUUUGCCUUCCC | 670 |
| | ACGU | | AGC | |
| miR-204-5p | UUCCCUUUGUCAUCCUA | 671 | AGGCAUAGGAUGACAAA | 672 |
| | UGCCU | | GGGAA | |
| miR-205-3p | GAUUUCAGUGGAGUGAA | 673 | GAACUUCACUCCACUGAA | 674 |
| | GUUC | | AUC | |
| miR-205-5p | UCCUUCAUUCCACCGGA | 675 | CAGACUCCGGUGGAAUGA | 676 |
| | GUCUG | | AGGA | |
| miR-2052 | UGUUUUGAUAACAGUAA | 677 | ACAUUACUGUUAUCAAAA | 678 |
| | UGU | | CA | |
| miR-2053 | GUGUUAAUUAAACCUCU | 679 | GUAAAUAGAGGUUUAAU | 680 |
| | AUUUAC | | UAACAC | |
| miR-2054 | CUGUAAUAUAAAUUUAA | 681 | AAUAAAUUAAAUUUAUA | 682 |
| | UUUAUU | | UUACAG | |
| miR-206 | UGGAAUGUAAGGAAGUG | 683 | CCACACACUUCCUUACAU | 684 |
| | UGUGG | | UCCA | |
| miR-208a | AUAAGACGAGCAAAAAG | 685 | ACAAGCUUUUUGCUCGUC | 686 |
| | CUUGU | | UUAU | |
| miR-208b | AUAAGACGAACAAAAGG | 687 | ACAAACCUUUUGUUCGUC | 688 |
| | UUUGU | | UUAU | |
| miR-20a-3p | ACUGCAUUAUGAGCACU | 689 | CUUUAAGUGCUCAUAAUG | 690 |
| | UAAAG | | CAGU | |
| miR-20a-5p | UAAAGUGCUUAUAGUGC | 691 | CUACCUGCACUAUAAGCA | 692 |
| | AGGUAG | | CUUUA | |
| miR-20b-3p | ACUGUAGUAUGGGCACU | 693 | CUGGAAGUGCCCAUACUA | 694 |
| | UCCAG | | CAGU | |
| miR-20b-5p | CAAAGUGCUCAUAGUGC | 695 | CUACCUGCACUAUGAGCA | 696 |
| | AGGUAG | | CUUUG | |
| miR-21-3p | CAACACCAGUCGAUGGG | 697 | ACAGCCCAUCGACUGGUG | 698 |
| | CUGU | | UUG | |
| miR-21-5p | UAGCUUAUCAGACUGAU | 699 | UCAACAUCAGUCUGAUAA | 700 |
| | GUUGA | | GCUA | |
| miR-210 | CUGUGCGUGUGACAGCG | 701 | UCAGCCGCUGUCACACGC | 702 |
| | GCUGA | | ACAG | |
| miR-211-3p | GCAGGGACAGCAAAGGG | 703 | GCACCCCUUUGCUGUCCC | 704 |
| | GUGC | | UGC | |
| miR-211-5p | UUCCCUUUGUCAUCCUU | 705 | AGGCGAAGGAUGACAAA | 706 |
| | CGCCU | | GGGAA | |
| miR-2110 | UUGGGGAAACGGCCGCU | 707 | CACUCAGCGGCCGUUUCC | 708 |
| | GAGUG | | CCAA | |
| miR-2113 | AUUUGUGCUUGGCUCUG | 709 | GUGACAGAGCCAAGCACA | 710 |
| | UCAC | | AAU | |
| miR-2114-3p | CGAGCCUCAAGCAAGGG | 711 | AAGUCCCUUGCUUGAGGC | 712 |
| | ACUU | | UCG | |
| miR-2114-5p | UAGUCCCUUCCUUGAAG | 713 | GACCGCUUCAAGGAAGGG | 714 |
| | CGGUC | | ACUA | |
| miR-2115-3p | CAUCAGAAUUCAUGGAG | 715 | CUAGCCUCCAUGAAUUCU | 716 |
| | GCUAG | | GAUG | |
| miR-2115-5p | AGCUUCCAUGACUCCUG | 717 | UCCAUCAGGAGUCAUGGA | 718 |
| | AUGGA | | AGCU | |
| miR-2116-3p | CCUCCCAUGCCAAGAAC | 719 | GGGAGUUCUUGGCAUGG | 720 |
| | UCCC | | GAGG | |
| miR-2116-5p | GGUUCUUAGCAUAGGAG | 721 | AGACCUCCUAUGCUAAGA | 722 |
| | GUCU | | ACC | |
| miR-2117 | UGUUCUCUUUGCCAAGG | 723 | CUGUCCUUGGCAAAGAGA | 724 |
| | ACAG | | ACA | |
| miR-212-3p | UAACAGUCUCCAGUCAC | 725 | GGCCGUGACUGGAGACUG | 726 |
| | GGCC | | UUA | |
| miR-212-5p | ACCUUGGCUCUAGACUG | 727 | AGUAAGCAGUCUAGAGCC | 728 |
| | CUUACU | | AAGGU | |
| miR-214-3p | ACAGCAGGCACAGACAG | 729 | ACUGCCUGUCUGUGCCUG | 730 |
| | GCAGU | | CUGU | |
| miR-214-5p | UGCCUGUCUACACUUGC | 731 | GCACAGCAAGUGUAGACA | 732 |
| | UGUGC | | GGCA | |
| miR-215 | AUGACCUAUGAAUUGAC | 733 | GUCUGUCAAUUCAUAGGU | 734 |
| | AGAC | | CAU | |
| miR-216a | UAAUCUCAGCUGGCAAC | 735 | UCACAGUUGCCAGCUGAG | 736 |
| | UGUGA | | AUUA | |
| miR-216b | AAAUCUCUGCAGGCAAA | 737 | UCACAUUUGCCUGCAGAG | 738 |
| | UGUGA | | AUUU | |
| miR-217 | UACUGCAUCAGGAACUG | 739 | UCCAAUCAGUUCCUGAUG | 740 |
| | AUUGGA | | CAGUA | |
| miR-218-1-3p | AUGGUUCCGUCAAGCAC | 741 | CCAUGGUGCUUGACGGAA | 742 |
| | CAUGG | | CCAU | |
| miR-218-2-3p | CAUGGUUCUGUCAAGCA | 743 | CGCGGUGCUUGACAGAAC | 744 |
| | CCGCG | | CAUG | |
| miR-218-5p | UUGUGCUUGAUCUAACC | 745 | ACAUGGUUAGAUCAAGCA | 746 |
| | AUGU | | CAA | |
| miR-219-1-3p | AGAGUUGAGUCUGGACG | 747 | CGGGACGUCCAGACUCAA | 748 |
| | UCCCG | | CUCU | |
| miR-219-2-3p | AGAAUUGUGGCUGGACA | 749 | ACAGAUGUCCAGCCACAA | 750 |
| | UCUGU | | UUCU | |
| miR-219-5p | UGAUUGUCCAAACGCAA | 751 | AGAAUUGCGUUUGGACA | 752 |
| | UUCU | | AUCA | |
| miR-22-3p | AAGCUGCCAGUUGAAGA | 753 | ACAGUUCUUCAACUGGCA | 754 |
| | ACUGU | | GCUU | |
| miR-22-5p | AGUUCUUCAGUGGCAAG | 755 | UAAAGCUUGCCACUGAAG | 756 |
| | CUUUA | | AACU | |
| miR-221-3p | AGCUACAUUGUCUGCUG | 757 | GAAACCCAGCAGACAAUG | 758 |
| | GGUUUC | | UAGCU | |
| miR-221-5p | ACCUGGCAUACAAUGUA | 759 | AAAUCUACAUUGUAUGCC | 760 |
| | GAUUU | | AGGU | |
| miR-222-3p | AGCUACAUCUGGCUACU | 761 | ACCCAGUAGCCAGAUGUA | 762 |
| | GGGU | | GCU | |
| miR-222-5p | CUCAGUAGCCAGUGUAG | 763 | AGGAUCUACACUGGCUAC | 764 |
| | AUCCU | | UGAG | |
| miR-223-3p | UGUCAGUUUGUCAAAUA | 765 | UGGGGUAUUUGACAAAC | 766 |
| | CCCCA | | UGACA | |
| miR-223-5p | CGUGUAUUUGACAAGCU | 767 | AACUCAGCUUGUCAAAUA | 768 |
| | GAGUU | | CACG | |
| miR-224-3p | AAAAUGGUGCCCUAGUG | 769 | UGUAGUCACUAGGGCACC | 770 |
| | ACUACA | | AUUUU | |
| miR-224-5p | CAAGUCACUAGUGGUUC | 771 | AACGGAACCACUAGUGAC | 772 |
| | CGUU | | UUG | |
| miR-2276 | UCUGCAAGUGUCAGAGG | 773 | CCUCGCCUCUGACACUUG | 774 |
| | CGAGG | | CAGA | |
| miR-2277-3p | UGACAGCGCCCUGCCUG | 775 | GAGCCAGGCAGGGCGCUG | 776 |
| | GCUC | | UCA | |
| miR-2277-5p | AGCGCGGGCUGAGCGCU | 777 | GACUGGCAGCGCUCAGCC | 778 |
| | GCCAGUC | | CGCGCU | |
| miR-2278 | GAGAGCAGUGUGUGUUG | 779 | CCAGGCAACACACACUGC | 780 |
| | CCUGG | | UCUC | |
| miR-2355-3p | AUUGUCCUUGCUGUUUG | 781 | AUCUCCAAACAGCAAGGA | 782 |
| | GAGAU | | CAAU | |
| miR-2355-5p | AUCCCCAGAUACAAUGG | 783 | UUGUCCAUUGUAUCUGGG | 784 |
| | ACAA | | GAU | |
| miR-2392 | UAGGAUGGGGGUGAGAG | 785 | CACCUCUCACCCCCAUCC | 786 |
| | GUG | | UA | |
| miR-23a-3p | AUCACAUUGCCAGGGAU | 787 | GGAAAUCCCUGGCAAUGU | 788 |
| | UUCC | | GAU | |
| miR-23a-5p | GGGGUUCCUGGGGAUGG | 789 | AAAUCCCAUCCCCAGGAA | 790 |
| | GAUUU | | CCCC | |
| miR-23b-3p | AUCACAUUGCCAGGGAU | 791 | GGUAAUCCCUGGCAAUGU | 792 |
| | UACC | | GAU | |
| miR-23b-5p | UGGGUUCCUGGCAUGCU | 793 | AAAUCAGCAUGCCAGGAA | 794 |
| | GAUUU | | CCCA | |
| miR-23c | AUCACAUUGCCAGUGAU | 795 | GGGUAAUCACUGGCAAUG | 796 |
| | UACCC | | UGAU | |
| miR-24-1-5p | UGCCUACUGAGCUGAUA | 797 | ACUGAUAUCAGCUCAGUA | 798 |
| | UCAGU | | GGCA | |
| miR-24-2-5p | UGCCUACUGAGCUGAAA | 799 | CUGUGUUUCAGCUCAGUA | 800 |
| | CACAG | | GGCA | |
| miR-24-3p | UGGCUCAGUUCAGCAGG | 801 | CUGUUCCUGCUGAACUGA | 802 |
| | AACAG | | GCCA | |
| miR-2467-3p | AGCAGAGGCAGAGAGGC | 803 | CCUGAGCCUCUCUGCCUC | 804 |
| | UCAGG | | UGCU | |
| miR-2467-5p | UGAGGCUCUGUUAGCCU | 805 | GAGCCAAGGCUAACAGAG | 806 |
| | UGGCUC | | CCUCA | |
| miR-25-3p | CAUUGCACUUGUCUCGG | 807 | UCAGACCGAGACAAGUGC | 808 |
| | UCUGA | | AAUG | |
| miR-25-5p | AGGCGGAGACUUGGGCA | 809 | CAAUUGCCCAAGUCUCCG | 810 |
| | AUUG | | CCU | |
| miR-2681-3p | UAUCAUGGAGUUGGUAA | 811 | GUGCUUUACCAACUCCAU | 812 |
| | AGCAC | | GAUA | |
| miR-2681-5p | GUUUUACCACCUCCAGG | 813 | AGUCUCCUGGAGGUGGUA | 814 |
| | AGACU | | AAAC | |
| miR-2682-3p | CGCCUCUUCAGCGCUGU | 815 | GGAAGACAGCGCUGAAGA | 816 |
| | CUUCC | | GGCG | |
| miR-2682-5p | CAGGCAGUGACUGUUCA | 817 | GACGUCUGAACAGUCACU | 818 |
| | GACGUC | | GCCUG | |
| miR-26a-1-3p | CCUAUUCUUGGUUACUU | 819 | CGUGCAAGUAACCAAGAA | 820 |
| | GCACG | | UAGG | |
| miR-26a-2-3p | CCUAUUCUUGAUUACUU | 821 | GAAACAAGUAAUCAAGA | 822 |
| | GUUUC | | AUAGG | |
| miR-26a-5p | UUCAAGUAAUCCAGGAU | 823 | AGCCUAUCCUGGAUUACU | 824 |
| | AGGCU | | UGAA | |
| miR-26b-3p | CCUGUUCUCCAUUACUU | 825 | GAGCCAAGUAAUGGAGA | 826 |
| | GGCUC | | ACAGG | |
| miR-26b-5p | UUCAAGUAAUUCAGGAU | 827 | ACCUAUCCUGAAUUACUU | 828 |
| | AGGU | | GAA | |
| miR-27a-3p | UUCACAGUGGCUAAGUU | 829 | GCGGAACUUAGCCACUGU | 830 |
| | CCGC | | GAA | |
| miR-27a-5p | AGGGCUUAGCUGCUUGU | 831 | UGCUCACAAGCAGCUAAG | 832 |
| | GAGCA | | CCCU | |
| miR-27b-3p | UUCACAGUGGCUAAGUU | 833 | GCAGAACUUAGCCACUGU | 834 |
| | CUGC | | GAA | |
| miR-27b-5p | AGAGCUUAGCUGAUUGG | 835 | GUUCACCAAUCAGCUAAG | 836 |
| | UGAAC | | CUCU | |
| miR-28-3p | CACUAGAUUGUGAGCUC | 837 | UCCAGGAGCUCACAAUCU | 838 |
| | CUGGA | | AGUG | |
| miR-28-5p | AAGGAGCUCACAGUCUA | 839 | CUCAAUAGACUGUGAGCU | 840 |
| | UUGAG | | CCUU | |
| miR-2861 | GGGGCCUGGCGGUGGGC | 841 | CCGCCCACCGCCAGGCCC | 842 |
| | GG | | C | |
| miR-2909 | GUUAGGGCCAACAUCUC | 843 | CCAAGAGAUGUUGGCCCU | 844 |
| | UUGG | | AAC | |
| miR-296-3p | GAGGGUUGGGUGGAGGC | 845 | GGAGAGCCUCCACCCAAC | 846 |
| | UCUCC | | CCUC | |
| miR-296-5p | AGGGCCCCCCCUCAAUC | 847 | ACAGGAUUGAGGGGGGG | 848 |
| | CUGU | | CCCU | |
| miR-2964a-3p | AGAAUUGCGUUUGGACA | 849 | ACUGAUUGUCCAAACGCA | 850 |
| | AUCAGU | | AUUCU | |
| miR-2964a-5p | AGAUGUCCAGCCACAAU | 851 | CGAGAAUUGUGGCUGGAC | 852 |
| | UCUCG | | AUCU | |
| miR-297 | AUGUAUGUGUGCAUGUG | 853 | CAUGCACAUGCACACAUA | 854 |
| | CAUG | | CAU | |
| miR-298 | AGCAGAAGCAGGGAGGU | 855 | UGGGAGAACCUCCCUGCU | 856 |
| | UCUCCCA | | UCUGCU | |
| miR-299-3p | UAUGUGGGAUGGUAAAC | 857 | AAGCGGUUUACCAUCCCA | 858 |
| | CGCUU | | CAUA | |
| miR-299-5p | UGGUUUACCGUCCCACA | 859 | AUGUAUGUGGGACGGUA | 860 |
| | UACAU | | AACCA | |
| miR-29a-3p | UAGCACCAUCUGAAAUC | 861 | UAACCGAUUUCAGAUGGU | 862 |
| | GGUUA | | GCUA | |
| miR-29a-5p | ACUGAUUUCUUUUGGUG | 863 | CUGAACACCAAAAGAAAU | 864 |
| | UUCAG | | CAGU | |
| miR-29b-1-5p | GCUGGUUUCAUAUGGUG | 865 | UCUAAACCACCAUAUGAA | 866 |
| | GUUUAGA | | ACCAGC | |
| miR-29b-2-5p | CUGGUUUCACAUGGUGG | 867 | CUAAGCCACCAUGUGAAA | 868 |
| | CUUAG | | CCAG | |
| miR-29b-3p | UAGCACCAUUUGAAAUC | 869 | AACACUGAUUUCAAAUGG | 870 |
| | AGUGUU | | UGCUA | |
| miR-29c-3p | UAGCACCAUUUGAAAUC | 871 | UAACCGAUUUCAAAUGGU | 872 |
| | GGUUA | | GCUA | |
| miR-29c-5p | UGACCGAUUUCUCCUGG | 873 | GAACACCAGGAGAAAUCG | 874 |
| | UGUUC | | GUCA | |
| miR-300 | UAUACAAGGGCAGACUC | 875 | AGAGAGAGUCUGCCCUUG | 876 |
| | UCUCU | | UAUA | |
| miR-301a-3p | CAGUGCAAUAGUAUUGU | 877 | GCUUUGACAAUACUAUUG | 878 |
| | CAAAGC | | CACUG | |
| miR-301a-5p | GCUCUGACUUUAUUGCA | 879 | AGUAGUGCAAUAAAGUC | 880 |
| | CUACU | | AGAGC | |
| miR-301b | CAGUGCAAUGAUAUUGU | 881 | GCUUUGACAAUAUCAUUG | 882 |
| | CAAAGC | | CACUG | |
| miR-302a-3p | UAAGUGCUUCCAUGUUU | 883 | UCACCAAAACAUGGAAGC | 884 |
| | UGGUGA | | ACUUA | |
| miR-302a-5p | ACUUAAACGUGGAUGUA | 885 | AGCAAGUACAUCCACGUU | 886 |
| | CUUGCU | | UAAGU | |
| miR-302b-3p | UAAGUGCUUCCAUGUUU | 887 | CUACUAAAACAUGGAAGC | 888 |
| | UAGUAG | | ACUUA | |
| miR-302b-5p | ACUUUAACAUGGAAGUG | 889 | GAAAGCACUUCCAUGUUA | 890 |
| | CUUUC | | AAGU | |
| miR-302c-3p | UAAGUGCUUCCAUGUUU | 891 | CCACUGAAACAUGGAAGC | 892 |
| | CAGUGG | | ACUUA | |
| miR-302c-5p | UUUAACAUGGGGGUACC | 893 | CAGCAGGUACCCCCAUGU | 894 |
| | UGCUG | | UAAA | |
| miR-302d-3p | UAAGUGCUUCCAUGUUU | 895 | ACACUCAAACAUGGAAGC | 896 |
| | GAGUGU | | ACUUA | |
| miR-302d-5p | ACUUUAACAUGGAGGCA | 897 | GCAAGUGCCUCCAUGUUA | 898 |
| | CUUGC | | AAGU | |
| miR-302e | UAAGUGCUUCCAUGCUU | 899 | AAGCAUGGAAGCACUUA | 900 |
| miR-302f | UAAUUGCUUCCAUGUUU | 901 | AAACAUGGAAGCAAUUA | 902 |
| miR-3064-3p | UUGCCACACUGCAACAC | 903 | UGUAAGGUGUUGCAGUG | 904 |
| | CUUACA | | UGGCAA | |
| miR-3064-5p | UCUGGCUGUUGUGGUGU | 905 | UUGCACACCACAACAGCC | 906 |
| | GCAA | | AGA | |
| miR-3065-3p | UCAGCACCAGGAUAUUG | 907 | CUCCAACAAUAUCCUGGU | 908 |
| | UUGGAG | | GCUGA | |
| miR-3065-5p | UCAACAAAAUCACUGAU | 909 | UCCAGCAUCAGUGAUUUU | 910 |
| | GCUGGA | | GUUGA | |
| miR-3074-3p | GAUAUCAGCUCAGUAGG | 911 | CGGUGCCUACUGAGCUGA | 912 |
| | CACCG | | UAUC | |
| miR-3074-5p | GUUCCUGCUGAACUGAG | 913 | CUGGCUCAGUUCAGCAGG | 914 |
| | CCAG | | AAC | |
| miR-30a-3p | CUUUCAGUCGGAUGUUU | 915 | GCUGCAAACAUCCGACUG | 916 |
| | GCAGC | | AAAG | |
| miR-30a-5p | UGUAAACAUCCUCGACU | 917 | CUUCCAGUCGAGGAUGUU | 918 |
| | GGAAG | | UACA | |
| miR-30b-3p | CUGGGAGGUGGAUGUUU | 919 | GAAGUAAACAUCCACCUC | 920 |
| | ACUUC | | CCAG | |
| miR-30b-5p | UGUAAACAUCCUACACU | 921 | AGCUGAGUGUAGGAUGU | 922 |
| | CAGCU | | UUACA | |
| miR-30c-1-3p | CUGGGAGAGGGUUGUUU | 923 | GGAGUAAACAACCCUCUC | 924 |
| | ACUCC | | CCAG | |
| miR-30c-2-3p | CUGGGAGAAGGCUGUUU | 925 | AGAGUAAACAGCCUUCUC | 926 |
| | ACUCU | | CCAG | |
| miR-30c-5p | UGUAAACAUCCUACACU | 927 | GCUGAGAGUGUAGGAUG | 928 |
| | CUCAGC | | UUUACA | |
| miR-30d-3p | CUUUCAGUCAGAUGUUU | 929 | GCAGCAAACAUCUGACUG | 930 |
| | GCUGC | | AAAG | |
| miR-30d-5p | UGUAAACAUCCCCGACU | 931 | CUUCCAGUCGGGGAUGUU | 932 |
| | GGAAG | | UACA | |
| miR-30e-3p | CUUUCAGUCGGAUGUUU | 933 | GCUGUAAACAUCCGACUG | 934 |
| | ACAGC | | AAAG | |
| miR-30e-5p | UGUAAACAUCCUUGACU | 935 | CUUCCAGUCAAGGAUGUU | 936 |
| | GGAAG | | UACA | |
| miR-31-3p | UGCUAUGCCAACAUAUU | 937 | AUGGCAAUAUGUUGGCA | 938 |
| | GCCAU | | UAGCA | |
| miR-31-5p | AGGCAAGAUGCUGGCAU | 939 | AGCUAUGCCAGCAUCUUG | 940 |
| | AGCU | | CCU | |
| miR-3115 | AUAUGGGUUUACUAGUU | 941 | ACCAACUAGUAAACCCAU | 942 |
| | GGU | | AU | |
| miR-3116 | UGCCUGGAACAUAGUAG | 943 | AGUCCCUACUAUGUUCCA | 944 |
| | GGACU | | GGCA | |
| miR-3117-3p | AUAGGACUCAUAUAGUG | 945 | CUGGCACUAUAUGAGUCC | 946 |
| | CCAG | | UAU | |
| miR-3117-5p | AGACACUAUACGAGUCA | 947 | AUAUGACUCGUAUAGUG | 948 |
| | UAU | | UCU | |
| miR-3118 | UGUGACUGCAUUAUGAA | 949 | AGAAUUUUCAUAAUGCA | 950 |
| | AAUUCU | | GUCACA | |
| miR-3119 | UGGCUUUUAACUUUGAU | 951 | GCCAUCAAAGUUAAAAGC | 952 |
| | GGC | | CA | |
| miR-3120-3p | CACAGCAAGUGUAGACA | 953 | UGCCUGUCUACACUUGCU | 954 |
| | GGCA | | GUG | |
| miR-3120-5p | CCUGUCUGUGCCUGCUG | 955 | UGUACAGCAGGCACAGAC | 956 |
| | UACA | | AGG | |
| miR-3121-3p | UAAAUAGAGUAGGCAAA | 957 | UGUCCUUUGCCUACUCUA | 958 |
| | GGACA | | UUUA | |
| miR-3121-5p | UCCUUUGCCUAUUCUAU | 959 | CUUAAAUAGAAUAGGCA | 960 |
| | UUAAG | | AAGGA | |
| miR-3122 | GUUGGGACAAGAGGACG | 961 | AAGACCGUCCUCUUGUCC | 962 |
| | GUCUU | | CAAC | |
| miR-3123 | CAGAGAAUUGUUUAAUC | 963 | GAUUAAACAAUUCUCUG | 964 |
| miR-3124-3p | ACUUUCCUCACUCCCGU | 965 | ACUUCACGGGAGUGAGGA | 966 |
| | GAAGU | | AAGU | |
| miR-3124-5p | UUCGCGGGCGAAGGCAA | 967 | GACUUUGCCUUCGCCCGC | 968 |
| | AGUC | | GAA | |
| miR-3125 | UAGAGGAAGCUGUGGAG | 969 | UCUCUCCACAGCUUCCUC | 970 |
| | AGA | | UA | |
| miR-3126-3p | CAUCUGGCAUCCGUCAC | 971 | UCUGUGUGACGGAUGCCA | 972 |
| | ACAGA | | GAUG | |
| miR-3126-5p | UGAGGGACAGAUGCCAG | 973 | UGCUUCUGGCAUCUGUCC | 974 |
| | AAGCA | | CUCA | |
| miR-3127-3p | UCCCCUUCUGCAGGCCU | 975 | CCAGCAGGCCUGCAGAAG | 976 |
| | GCUGG | | GGGA | |
| miR-3127-5p | AUCAGGGCUUGUGGAAU | 977 | CUUCCCAUUCCACAAGCC | 978 |
| | GGGAAG | | CUGAU | |
| miR-3128 | UCUGGCAAGUAAAAAAC | 979 | AUGAGAGUUUUUUACUU | 980 |
| | UCUCAU | | GCCAGA | |
| miR-3129-3p | AAAGCCUAAUCUCUACACU | 981 | GCAGCAGUGUAGAGAUU | 982 |
| | GCUGC | | AGUUU | |
| miR-3129-5p | GCAGUAGUGUAGAGAUU | 983 | AAACCAAUCUCUACACUA | 984 |
| | GGUUU | | CUGC | |
| miR-3130-3p | GCUGCACCGGAGACUGG | 985 | UUACCCAGUCUCCGGUGC | 986 |
| | GUAA | | AGC | |
| miR-3130-5p | UACCCAGUCUCCGGUGC | 987 | GGCUGCACCGGAGACUGG | 988 |
| | AGCC | | GUA | |
| miR-3131 | UCGAGGACUGGUGGAAG | 989 | AAGGCCCUUCCACCAGUC | 990 |
| | GGCCUU | | CUCGA | |
| miR-3132 | UGGGUAGAGAAGGAGCU | 991 | UCCUCUGAGCUCCUUCUC | 992 |
| | CAGAGGA | | UACCCA | |
| miR-3133 | UAAAGAACUCUUAAAAC | 993 | AUUGGGUUUUAAGAGUU | 994 |
| | CCAAU | | CUUUA | |
| miR-3134 | UGAUGGAUAAAAGACUA | 995 | AAUAUGUAGUCUUUUAU | 996 |
| | CAUAUU | | CCAUCA | |
| miR-3135a | UGCCUAGGCUGAGACUG | 997 | CACUGCAGUCUCAGCCUA | 998 |
| | CAGUG | | GGCA | |
| miR-3135b | GGCUGGAGCGAGUGCAG | 999 | CACCACUGCACUCGCUCC | 1000 |
| | UGGUG | | AGCC | |
| miR-3136-3p | UGGCCCAACCUAUUCAG | 1001 | ACUAACUGAAUAGGUUG | 1002 |
| | UUAGU | | GGCCA | |
| miR-3136-5p | CUGACUGAAUAGGUAGG | 1003 | AAUGACCCUACCUAUUCA | 1004 |
| | GUCAUU | | GUCAG | |
| miR-3137 | UCUGUAGCCUGGGAGCA | 1005 | ACCCCAUUGCUCCCAGGC | 1006 |
| | AUGGGGU | | UACAGA | |
| miR-3138 | UGUGGACAGUGAGGUAG | 1007 | ACUCCCUCUACCUCACUG | 1008 |
| | AGGGAGU | | UCCACA | |
| miR-3139 | UAGGAGCUCAACAGAUG | 1009 | AACAGGCAUCUGUUGAGC | 1010 |
| | CCUGUU | | UCCUA | |
| miR-3140-3p | AGCUUUUGGGAAUUCAG | 1011 | ACUACCUGAAUUCCCAAA | 1012 |
| | GUAGU | | AGCU | |
| miR-3140-5p | ACCUGAAUUACCAAAAG | 1013 | AAAGCUUUUGGUAAUUC | 1014 |
| | CUUU | | AGGU | |
| miR-3141 | GAGGGCGGGUGGAGGAG | 1015 | UCCUCCUCCACCCGCCCU | 1016 |
| | GA | | C | |
| miR-3142 | AAGGCCUUUCUGAACCU | 1017 | UCUGAAGGUUCAGAAAG | 1018 |
| | UCAGA | | GCCUU | |
| miR-3143 | AUAACAUUGUAAAGCGC | 1019 | CGAAAGAAGCGCUUUACA | 1020 |
| | UUCUUUCG | | AUGUUAU | |
| miR-3144-3p | AUAUACCUGUUCGGUCU | 1021 | UAAAGAGACCGAACAGGU | 1022 |
| | CUUUA | | AUAU | |
| miR-3144-5p | AGGGGACCAAAGAGAUA | 1023 | CUAUAUAUCUCUUUGGUC | 1024 |
| | UAUAG | | CCCU | |
| miR-3145-3p | AGAUAUUUUGAGUGUUU | 1025 | CAAUUCCAAACACUCAAA | 1026 |
| | GGAAUUG | | AUAUCU | |
| miR-3145-5p | AACUCCAAACACUCAAA | 1027 | UGAGUUUUGAGUGUUUG | 1028 |
| | ACUCA | | GAGUU | |
| miR-3146 | CAUGCUAGGAUAGAAAG | 1029 | CCAUUCUUUCUAUCCUAG | 1030 |
| | AAUGG | | CAUG | |
| miR-3147 | GGUUGGGCAGUGAGGAG | 1031 | UCACACCCUCCUCACUGC | 1032 |
| | GGUGUGA | | CCAACC | |
| miR-3148 | UGGAAAAAACUGGUGUG | 1033 | AAGCACACACCAGUUUUU | 1034 |
| | UGCUU | | UCCA | |
| miR-3149 | UUUGUAUGGAUAUGUGU | 1035 | AUACACACACAUAUCCAU | 1036 |
| | GUGUAU | | ACAAA | |
| miR-3150a-3p | CUGGGGAGAUCCUCGAG | 1037 | CCAACCUCGAGGAUCUCC | 1038 |
| | GUUGG | | CCAG | |
| miR-3150a-5p | CAACCUCGACGAUCUCC | 1039 | GCUGAGGAGAUCGUCGAG | 1040 |
| | UCAGC | | GUUG | |
| miR-3150b-3p | UGAGGAGAUCGUCGAGG | 1041 | CCAACCUCGACGAUCUCC | 1042 |
| | UUGG | | UCA | |
| miR-3150b-5p | CAACCUCGAGGAUCUCC | 1043 | GCUGGGGAGAUCCUCGAG | 1044 |
| | CCAGC | | GUUG | |
| miR-3151 | GGUGGGGCAAUGGGAUC | 1045 | ACCUGAUCCCAUUGCCCC | 1046 |
| | AGGU | | ACC | |
| miR-3152-3p | UGUGUUAGAAUAGGGGC | 1047 | UUAUUGCCCCUAUUCUAA | 1048 |
| | AAUAA | | CACA | |
| miR-3152-5p | AUUGCCUCUGUUCUAAC | 1049 | CUUGUGUUAGAACAGAG | 1050 |
| | ACAAG | | GCAAU | |
| miR-3153 | GGGGAAAGCGAGUAGGG | 1051 | AAAUGUCCCUACUCGCUU | 1052 |
| | ACAUUU | | UCCCC | |
| miR-3154 | CAGAAGGGGAGUUGGGA | 1053 | UCUGCUCCCAACUCCCCU | 1054 |
| | GCAGA | | UCUG | |
| miR-3155a | CCAGGCUCUGCAGUGGG | 1055 | AGUUCCCACUGCAGAGCC | 1056 |
| | AACU | | UGG | |
| miR-3155b | CCAGGCUCUGCAGUGGG | 1057 | UCCCACUGCAGAGCCUGG | 1058 |
| | A | | | |
| miR-3156-3p | CUCCCACUUCCAGAUCU | 1059 | AGAAAGAUCUGGAAGUG | 1060 |
| | UUCU | | GGAG | |
| miR-3156-5p | AAAGAUCUGGAAGUGGG | 1061 | UGUCUCCCACUUCCAGAU | 1062 |
| | AGACA | | CUUU | |
| miR-3157-3p | CUGCCCUAGUCUAGCUG | 1063 | AGCUUCAGCUAGACUAGG | 1064 |
| | AAGCU | | GCAG | |
| miR-3157-5p | UUCAGCCAGGCUAGUGC | 1065 | AGACUGCACUAGCCUGGC | 1066 |
| | AGUCU | | UGAA | |
| miR-3158-3p | AAGGGCUUCCUCUCUGC | 1067 | GUCCUGCAGAGAGGAAGC | 1068 |
| | AGGAC | | CCUU | |
| miR-3158-5p | CCUGCAGAGAGGAAGCC | 1069 | GAAGGGCUUCCUCUCUGC | 1070 |
| | CUUC | | AGG | |
| miR-3159 | UAGGAUUACAAGUGUCG | 1071 | GUGGCCGACACUUGUAAU | 1072 |
| | GCCAC | | CCUA | |
| miR-3160-3p | AGAGCUGAGACUAGAAA | 1073 | UGGGCUUUCUAGUCUCAG | 1074 |
| | GCCCA | | CUCU | |
| miR-3160-5p | GGCUUUCUAGUCUCAGC | 1075 | GGAGAGCUGAGACUAGA | 1076 |
| | UCUCC | | AAGAC | |
| miR-3161 | CUGAUAAGAACAGAGGC | 1077 | AUCUGGGCCUCUGUUCUU | 1078 |
| | CCAGAU | | AUCAG | |
| miR-3162-3p | UCCCUACCCCUCCACUCC | 1079 | UGGGGAGUGGAGGGGUA | 1080 |
| | CCA | | GGGA | |
| miR-3162-5p | UUAGGGAGUAGAAGGGU | 1081 | CUCCCCACCCUUCUACUC | 1082 |
| | GGGGAG | | CCUAA | |
| miR-3163 | UAUAAAAUGAGGGCAGU | 1083 | GUCUUACUGCCCUCAUUU | 1084 |
| | AAGAC | | UAUA | |
| miR-3164 | UGUGACUUUAAGGGAAA | 1085 | CGCCAUUUCCCUUAAAGU | 1086 |
| | UGGCG | | CACA | |
| miR-3165 | AGGUGGAUGCAAUGUGA | 1087 | UGAGGUCACAUUGCAUCC | 1088 |
| | CCUCA | | ACCU | |
| miR-3166 | CGCAGACAAUGCCUACU | 1089 | UAGGCCAGUAGGCAUUGU | 1090 |
| | GGCCUA | | CUGCG | |
| miR-3167 | AGGAUUUCAGAAAUACU | 1091 | ACACCAGUAUUUCUGAAA | 1092 |
| | GGUGU | | UCCU | |
| miR-3168 | GAGUUCUACAGUCAGAC | 1093 | GUCUGACUGUAGAACUC | 1094 |
| miR-3169 | UAGGACUGUGCUUGGCA | 1095 | CUAUGUGCCAAGCACAGU | 1096 |
| | CAUAG | | CCUA | |
| miR-3170 | CUGGGGUUCUGAGACAG | 1097 | ACUGUCUGUCUCAGAACC | 1098 |
| | ACAGU | | CCAG | |
| miR-3171 | AGAUGUAUGGAAUCUGU | 1099 | GAUAUAUACAGAUUCCAU | 1100 |
| | AUAUAUC | | ACAUCU | |
| miR-3173-3p | AAAGGAGGAAAUAGGCA | 1101 | UGGCCUGCCUAUUUCCUC | 1102 |
| | GGCCA | | CUUU | |
| miR-3173-5p | UGCCCUGCCUGUUUUCU | 1103 | AAAGGAGAAAACAGGCA | 1104 |
| | CCUUU | | GGGCA | |
| miR-3174 | UAGUGAGUUAGAGAUGC | 1105 | GGCUCUGCAUCUCUAACU | 1106 |
| | AGAGCC | | CACUA | |
| miR-3175 | CGGGGAGAGAACGCAGU | 1107 | ACGUCACUGCGUUCUCUC | 1108 |
| | GACGU | | CCCG | |
| miR-3176 | ACUGGCCUGGGACUACC | 1109 | CCGGUAGUCCCAGGCCAG | 1110 |
| | GG | | U | |
| miR-3177-3p | UGCACGGCACUGGGGAC | 1111 | ACGUGUCCCCAGUGCCGU | 1112 |
| | ACGU | | GCA | |
| miR-3177-5p | UGUGUACACACGUGCCA | 1113 | AGCGCCUGGCACGUGUGU | 1114 |
| | GGCGCU | | ACACA | |
| miR-3178 | GGGGCGCGGCCGGAUCG | 1115 | CGAUCCGGCCGCGCCCC | 1116 |
| miR-3179 | AGAAGGGGUGAAAUUUA | 1117 | ACGUUUAAAUUUCACCCC | 1118 |
| | AACGU | | UUCU | |
| miR-3180 | UGGGGCGGAGCUUCCGG | 1119 | CUCCGGAAGCUCCGCCCC | 1120 |
| | AG | | A | |
| miR-3180-3p | UGGGGCGGAGCUUCCGG | 1121 | GGCCUCCGGAAGCUCCGC | 1122 |
| | AGGCC | | CCCA | |
| miR-3180-5p | CUUCCAGACGCUCCGCC | 1123 | CGACGUGGGGCGGAGCGU | 1124 |
| | CCACGUCG | | CUGGAAG | |
| miR-3181 | AUCGGGCCCUCGGCGCC | 1125 | CCGGCGCCGAGGGCCCGA | 1126 |
| | GG | | U | |
| miR-3182 | GCUUCUGUAGUGUAGUC | 1127 | GACUACACUACAGAAGC | 1128 |
| miR-3183 | GCCUCUCUCGGAGUCGC | 1129 | UCCGAGCGACUCCGAGAG | 1130 |
| | UCGGA | | AGGC | |
| miR-3184-3p | AAAGUCUCGCUCUCUGC | 1131 | UGAGGGGCAGAGAGCGA | 1132 |
| | CCCUCA | | GACUUU | |
| miR-3184-5p | UGAGGGGCCUCAGACCG | 1133 | AAAAGCUCGGUCUGAGGC | 1134 |
| | AGCUUUU | | CCCUCA | |
| miR-3185 | AGAAGAAGGCGGUCGGU | 1135 | CCGCAGACCGACCGCCUU | 1136 |
| | CUGCGG | | CUUCU | |
| miR-3186-3p | UCACGCGGAGAGAUGGC | 1137 | CAAAGCCAUCUCUCCGCG | 1138 |
| | UUUG | | UGA | |
| miR-3186-5p | CAGGCGUCUGUCUACGU | 1139 | AAGCCACGUAGACAGACG | 1140 |
| | GGCUU | | CCUG | |
| miR-3187-3p | UUGGCCAUGGGGCUGCG | 1141 | CCGCGCAGCCCCAUGGCC | 1142 |
| | CGG | | AA | |
| miR-3187-5p | CCUGGGCAGCGUGUGGC | 1143 | CCUUCAGCCACACGCUGC | 1144 |
| | UGAAGG | | CCAGG | |
| miR-3188 | AGAGGCUUUGUGCGGAU | 1145 | CCCCGUAUCCGCACAAAG | 1146 |
| | ACGGGG | | CCUCU | |
| miR-3189-3p | CCCUUGGGUCUGAUGGG | 1147 | CUACCCCAUCAGACCCAA | 1148 |
| | GUAG | | GGG | |
| miR-3189-5p | UGCCCCAUCUGUGCCCU | 1149 | UCCUACCCAGGGCACAGA | 1150 |
| | GGGUAGGA | | UGGGGCA | |
| miR-3190-3p | UGUGGAAGGUAGACGGC | 1151 | UCUCUGGCCGUCUACCUU | 1152 |
| | CAGAGA | | CCACA | |
| miR-3190-5p | UCUGGCCAGCUACGUCC | 1153 | UGGGGACGUAGCUGGCCA | 1154 |
| | CCA | | GA | |
| miR-3191-3p | UGGGGACGUAGCUGGCC | 1155 | CUGUCUGGCCAGCUACGU | 1156 |
| | AGACAG | | CCCCA | |
| miR-3191-5p | CUCUCUGGCCGUCUACC | 1157 | UGGAAGGUAGACGGCCAG | 1158 |
| | UUCCA | | AGAG | |
| miR-3192 | UCUGGGAGGUUGUAGCA | 1159 | UUCCACUGCUACAACCUC | 1160 |
| | GUGGAA | | CCAGA | |
| miR-3193 | UCCUGCGUAGGAUCUGA | 1161 | ACUCCUCAGAUCCUACGC | 1162 |
| | GGAGU | | AGGA | |
| miR-3194-3p | AGCUCUGCUGCUCACUG | 1163 | ACUGCCAGUGAGCAGCAG | 1164 |
| | GCAGU | | AGCU | |
| miR-3194-5p | GGCCAGCCACCAGGAGG | 1165 | CAGCCCUCCUGGUGGCUG | 1166 |
| | GCUG | | GCC | |
| miR-3195 | CGCGCCGGGCCCGGGUU | 1167 | AACCCGGGCCCGGCGCG | 1168 |
| miR-3196 | CGGGGCGGCAGGGGCCU | 1169 | GAGGCCCCUGCCGCCCCG | 1170 |
| | C | | | |
| miR-3197 | GGAGGCGCAGGCUCGGA | 1171 | CGCCUUUCCGAGCCUGCG | 1172 |
| | AAGGCG | | CCUCC | |
| miR-3198 | GUGGAGUCCUGGGGAAU | 1173 | UCUCCAUUCCCCAGGACU | 1174 |
| | GGAGA | | CCAC | |
| miR-3199 | AGGGACUGCCUUAGGAG | 1175 | AACUUUCUCCUAAGGCAG | 1176 |
| | AAAGUU | | UCCCU | |
| miR-32-3p | CAAUUUAGUGUGUGUGA | 1177 | AAAUAUCACACACACUAA | 1178 |
| | UAUUU | | AUUG | |
| miR-32-5p | UAUUGCACAUUACUAAG | 1179 | UGCAACUUAGUAAUGUGC | 1180 |
| | UUGCA | | AAUA | |
| miR-3200-3p | CACCUUGCGCUACUCAG | 1181 | CAGACCUGAGUAGCGCAA | 1182 |
| | GUCUG | | GGUG | |
| miR-3200-5p | AAUCUGAGAAGGCGCAC | 1183 | ACCUUGUGCGCCUUCUCA | 1184 |
| | AAGGU | | GAUU | |
| miR-3201 | GGGAUAUGAAGAAAAAU | 1185 | AUUUUUCUUCAUAUCCC | 1186 |
| miR-3202 | UGGAAGGGAGAAGAGCU | 1187 | AUUAAAGCUCUUCUCCCU | 1188 |
| | UUAAU | | UCCA | |
| miR-320a | AAAAGCUGGGUUGAGAG | 1189 | UCGCCCUCUCAACCCAGC | 1190 |
| | GGCGA | | UUUU | |
| miR-320b | AAAAGCUGGGUUGAGAG | 1191 | UCGCCCUCUCAACCCAGC | 1192 |
| | GGCAA | | UUUU | |
| miR-320c | AAAAGCUGGGUUGAGAG | 1193 | ACCCUCUCAACCCAGCUU | 1194 |
| | GGU | | UU | |
| miR-320d | AAAAGCUGGGUUGAGAG | 1195 | UCCUCUCAACCCAGCUUU | 1196 |
| | GA | | U | |
| miR-320e | AAAGCUGGGUUGAGAAG | 1197 | CCUUCUCAACCCAGCUUU | 1198 |
| | G | | | |
| miR-323a-3p | CACAUUACACGGUCGAC | 1199 | AGAGGUCGACCGUGUAAU | 1200 |
| | CUCU | | GUG | |
| miR-323a-5p | AGGUGGUCCGUGGCGCG | 1201 | GCGAACGCGCCACGGACC | 1202 |
| | UUCGC | | ACCU | |
| miR-323b-3p | CCCAAUACACGGUCGAC | 1203 | AAGAGGUCGACCGUGUAU | 1204 |
| | CUCUU | | UGGG | |
| miR-323b-5p | AGGUUGUCCGUGGUGAG | 1205 | UGCGAACUCACCACGGAC | 1206 |
| | UUCGCA | | AACCU | |
| miR-324-3p | ACUGCCCCAGGUGCUGC | 1207 | CCAGCAGCACCUGGGGCA | 1208 |
| | UGG | | GU | |
| miR-324-5p | CGCAUCCCCUAGGGCAU | 1209 | ACACCAAUGCCCUAGGGG | 1210 |
| | UGGUGU | | AUGCG | |
| miR-325 | CCUAGUAGGUGUCCAGU | 1211 | ACACUUACUGGACACCUA | 1212 |
| | AAGUGU | | CUAGG | |
| miR-326 | CCUCUGGGCCCUUCCUC | 1213 | CUGGAGGAAGGGCCCAGA | 1214 |
| | CAG | | GG | |
| miR-328 | CUGGCCCUCUCUGCCCU | 1215 | ACGGAAGGGCAGAGAGG | 1216 |
| | UCCGU | | GCCAG | |
| miR-329 | AACACACCUGGUUAACC | 1217 | AAAGAGGUUAACCAGGU | 1218 |
| | UCUUU | | GUGUU | |
| miR-330-3p | GCAAAGCACACGGCCUG | 1219 | UCUCUGCAGGCCGUGUGC | 1220 |
| | CAGAGA | | UUUGC | |
| miR-330-5p | UCUCUGGGCCUGUGUCU | 1221 | GCCUAAGACACAGGCCCA | 1222 |
| | UAGGC | | GAGA | |
| miR-331-3p | GCCCCUGGGCCUAUCCU | 1223 | UUCUAGGAUAGGCCCAGG | 1224 |
| | AGAA | | GGC | |
| miR-331-5p | CUAGGUAUGGUCCCAGG | 1225 | GGAUCCCUGGGACCAUAC | 1226 |
| | GAUCC | | CUAG | |
| miR-335-3p | UUUUUCAUUAUUGCUCC | 1227 | GGUCAGGAGCAAUAAUG | 1228 |
| | UGACC | | AAAAA | |
| miR-335-5p | UCAAGAGCAAUAACGAA | 1229 | ACAUUUUUCGUUAUUGCU | 1230 |
| | AAAUGU | | CUUGA | |
| miR-337-3p | CUCCUAUAUGAUGCCUU | 1231 | GAAGAAAGGCAUCAUAU | 1232 |
| | UCUUC | | AGGAG | |
| miR-337-5p | GAACGGCUUCAUACAGG | 1233 | AACUCCUGUAUGAAGCCG | 1234 |
| | AGUU | | UUC | |
| miR-338-3p | UCCAGCAUCAGUGAUUU | 1235 | CAACAAAAUCACUGAUGC | 1236 |
| | UGUUG | | UGGA | |
| miR-338-5p | AACAAUAUCCUGGUGCU | 1237 | CACUCAGCACCAGGAUAU | 1238 |
| | GAGUG | | UGUU | |
| miR-339-3p | UGAGCGCCUCGACGACA | 1239 | CGGCUCUGUCGUCGAGGC | 1240 |
| | GAGCCG | | GCUCA | |
| miR-339-5p | UCCCUGUCCUCCAGGAG | 1241 | CGUGAGCUCCUGGAGGAC | 1242 |
| | CUCACG | | AGGGA | |
| miR-33a-3p | CAAUGUUUCCACAGUGC | 1243 | GUGAUGCACUGUGGAAAC | 1244 |
| | AUCAC | | AUUG | |
| miR-33a-5p | GUGCAUUGUAGUUGCAU | 1245 | UGCAAUGCAACUACAAUG | 1246 |
| | UGCA | | CAC | |
| miR-33b-3p | CAGUGCCUCGGCAGUGC | 1247 | GGGCUGCACUGCCGAGGC | 1248 |
| | AGCCC | | ACUG | |
| miR-33b-5p | GUGCAUUGCUGUUGCAU | 1249 | GCAAUGCAACAGCAAUGC | 1250 |
| | UGC | | AC | |
| miR-340-3p | UCCGUCUCAGUUACUUU | 1251 | GCUAUAAAGUAACUGAG | 1252 |
| | AUAGC | | ACGGA | |
| miR-340-5p | UUAUAAAGCAAUGAGAC | 1253 | AAUCAGUCUCAUUGCUUU | 1254 |
| | UGAUU | | AUAA | |
| miR-342-3p | UCUCACACAGAAAUCGC | 1255 | ACGGGUGCGAUUUCUGUG | 1256 |
| | ACCCGU | | UGAGA | |
| miR-342-5p | AGGGGUGCUAUCUGUGA | 1257 | UCAAUCACAGAUAGCACC | 1258 |
| | UUGA | | CCU | |
| miR-345-3p | GCCCUGAACGAGGGGUC | 1259 | CUCCAGACCCCUCGUUCA | 1260 |
| | UGGAG | | GGGC | |
| miR-345-5p | GCUGACUCCUAGUCCAG | 1261 | GAGCCCUGGACUAGGAGU | 1262 |
| | GGCUC | | CAGC | |
| miR-346 | UGUCUGCCCGCAUGCCU | 1263 | AGAGGCAGGCAUGCGGGC | 1264 |
| | GCCUCU | | AGACA | |
| miR-34a-3p | CAAUCAGCAAGUAUACU | 1265 | AGGGCAGUAUACUUGCUG | 1266 |
| | GCCCU | | AUUG | |
| miR-34a-5p | UGGCAGUGUCUUAGCUG | 1267 | ACAACCAGCUAAGACACU | 1268 |
| | GUUGU | | GCCA | |
| miR-34b-3p | CAAUCACUAACUCCACU | 1269 | AUGGCAGUGGAGUUAGU | 1270 |
| | GCCAU | | GAUUG | |
| miR-34b-5p | UAGGCAGUGUCAUUAGC | 1271 | CAAUCAGCUAAUGACACU | 1272 |
| | UGAUUG | | GCCUA | |
| miR-34c-3p | AAUCACUAACCACACGG | 1273 | CCUGGCCGUGUGGUUAGU | 1274 |
| | CCAGG | | GAUU | |
| miR-34c-5p | AGGCAGUGUAGUUAGCU | 1275 | GCAAUCAGCUAACUACAC | 1276 |
| | GAUUGC | | UGCCU | |
| miR-3529-3p | AACAACAAAAUCACUAG | 1277 | UGGAAGACUAGUGAUUU | 1278 |
| | UCUUCCA | | UGUUGUU | |
| miR-3529-5p | AGGUAGACUGGGAUUUG | 1279 | AACAACAAAUCCCAGUCU | 1280 |
| | UUGUU | | ACCU | |
| miR-3545-3p | UUGAACUGUUAAGAACC | 1281 | UCCAGUGGUUCUUAACAG | 1282 |
| | ACUGGA | | UUCAA | |
| miR-3545-5p | UAGUGGUCCUAAACAUU | 1283 | UGUGAAAUGUUUAGGAC | 1284 |
| | UCACA | | CACUA | |
| miR-3591-3p | CACCAUUGUCACAC | 1285 | GUGGAGUGUGACAAUGG | 1286 |
| | UCCAC | | UGUUU | |
| miR-3591-5p | UUUAGUGUGAUAAUGGC | 1287 | UCAAACGCCAUUAUCACA | 1288 |
| | GUUUGA | | CUAAA | |
| miR-3605-3p | CCUCCGUGUUACCUGUC | 1289 | CUAGAGGACAGGUAACAC | 1290 |
| | CUCUAG | | GGAGG | |
| miR-3605-5p | UGAGGAUGGAUAGCAAG | 1291 | GGCUUCCUUGCUAUCCAU | 1292 |
| | GAAGCC | | CCUCA | |
| miR-3606 | UUAGUGAAGGCUAUUUU | 1293 | AAUUAAAAUAGCCUUCAC | 1294 |
| | AAUU | | UAA | |
| miR-3607-3p | ACUGUAAACGCUUUCUG | 1295 | CAUCAGAAAGCGUUUACA | 1296 |
| | AUG | | GU | |
| miR-3607-5p | GCAUGUGAUGAAGCAAA | 1297 | ACUGAUUUGCUUCAUCAC | 1298 |
| | UCAGU | | AUGC | |
| miR-3609 | CAAAGUGAUGAGUAAUA | 1299 | CAGCCAGUAUUACUCAUC | 1300 |
| | CUGGCUG | | ACUUUG | |
| miR-361-3p | UCCCCCAGGUGUGAUUC | 1301 | AAAUCAGAAUCACACCUG | 1302 |
| | UGAUUU | | GGGGA | |
| miR-361-5p | UUAUCAGAAUCUCCAGG | 1303 | GUACCCCUGGAGAUUCUG | 1304 |
| | GGUAC | | AUAA | |
| miR-3610 | GAAUCGGAAAGGAGGCG | 1305 | CGGCGCCUCCUUUCCGAU | 1306 |
| | CCG | | UC | |
| miR-3611 | UUGUGAAGAAAGAAAUU | 1307 | UAAGAAUUUCUUUCUUCA | 1308 |
| | CUUA | | CAA | |
| miR-3612 | AGGAGGCAUCUUGAGAA | 1309 | UCCAUUUCUCAAGAUGCC | 1310 |
| | AUGGA | | UCCU | |
| miR-3613-3p | ACAAAAAAAAAAGCCCA | 1311 | GAAGGGUUGGGCUUUUU | 1312 |
| | ACCCUUC | | UUUUUGU | |
| miR-3613-5p | UGUUGUACUUUUUUUUU | 1313 | GAACAAAAAAAAAAGUA | 1314 |
| | UGUUC | | CAACA | |
| miR-3614-3p | UAGCCUUCAGAUCUUGG | 1315 | AAAACACCAAGAUCUGAA | 1316 |
| | UGUUUU | | GGCUA | |
| miR-3614-5p | CCACUUGGAUCUGAAGG | 1317 | GGGCAGCCUUCAGAUCCA | 1318 |
| | CUGCCC | | AGUGG | |
| miR-3615 | UCUCUCGGCUCCUCGCG | 1319 | GAGCCGCGAGGAGCCGAG | 1320 |
| | GCUC | | AGA | |
| miR-3616-3p | CGAGGGCAUUUCAUGAU | 1321 | GCCUGCAUCAUGAAAUGC | 1322 |
| | GCAGGC | | CCUCG | |
| miR-3616-5p | AUGAAGUGCACUCAUGA | 1323 | ACAUAUCAUGAGUGCACU | 1324 |
| | UAUGU | | UCAU | |
| miR-3617 | AAAGACAUAGUUGCAAG | 1325 | CCCAUCUUGCAACUAUGU | 1326 |
| | AUGGG | | CUUU | |
| miR-3618 | UGUCUACAUUAAUGAAA | 1327 | GCUCUUUUCAUUAAUGUA | 1328 |
| | AGAGC | | GACA | |
| miR-3619-3p | GGGACCAUCCUGCCUGC | 1329 | CCACAGCAGGCAGGAUGG | 1330 |
| | UGUGG | | UCCC | |
| miR-3619-5p | UCAGCAGGCAGGCUGGU | 1331 | GCUGCACCAGCCUGCCUG | 1332 |
| | GCAGC | | CUGA | |
| miR-362-3p | AACACACCUAUUCAAGG | 1333 | UGAAUCCUUGAAUAGGU | 1334 |
| | AUUCA | | GUGUU | |
| miR-362-5p | AAUCCUUGGAACCUAGG | 1335 | ACUCACACCUAGGUUCCA | 1336 |
| | UGUGAGU | | AGGAUU | |
| miR-3620 | UCACCCUGCAUCCCGCA | 1337 | CUGGGUGCGGGAUGCAGG | 1338 |
| | CCCAG | | GUGA | |
| miR-3621 | CGCGGGUCGGGGUCUGC | 1339 | CCUGCAGACCCCGACCCG | 1340 |
| | AGG | | CG | |
| miR-3622a-3p | UCACCUGACCUCCCAUG | 1341 | ACAGGCAUGGGAGGUCAG | 1342 |
| | CCUGU | | GUGA | |
| miR-3622a-5p | CAGGCACGGGAGCUCAG | 1343 | CUCACCUGAGCUCCCGUG | 1344 |
| | GUGAG | | CCUG | |
| miR-3622b-3p | UCACCUGAGCUCCCGUG | 1345 | CAGGCACGGGAGCUCAGG | 1346 |
| | CCUG | | UGA | |
| miR-3622b-5p | AGGCAUGGGAGGUCAGG | 1347 | UCACCUGACCUCCCAUGC | 1348 |
| | UGA | | CU | |
| miR-363-3p | AAUUGCACGGUAUCCAU | 1349 | UACAGAUGGAUACCGUGC | 1350 |
| | CUGUA | | AAUU | |
| miR-363-5p | CGGGUGGAUCACGAUGC | 1351 | AAAUUGCAUCGUGAUCCA | 1352 |
| | AAUUU | | CCCG | |
| miR-3646 | AAAAUGAAAUGAGCCCA | 1353 | UGGGCUGGGCUCAUUUCA | 1354 |
| | GCCCA | | UUUU | |
| miR-3648 | AGCCGCGGGGAUCGCCG | 1355 | CCCUCGGCGAUCCCCGCG | 1356 |
| | AGGG | | GCU | |
| miR-3649 | AGGGACCUGAGUGUCUA | 1357 | CUUAGACACUCAGGUCCC | 1358 |
| | AG | | U | |
| miR-3650 | AGGUGUGUCUGUAGAGU | 1359 | GGACUCUACAGACACACC | 1360 |
| | CC | | U | |
| miR-3651 | CAUAGCCCGGUCGCUGG | 1361 | UCAUGUACCAGCGACCGG | 1362 |
| | UACAUGA | | GCUAUG | |
| miR-3652 | CGGCUGGAGGUGUGAGG | 1363 | UCCUCACACCUCCAGCCG | 1364 |
| | A | | | |
| miR-3653 | CUAAGAAGUUGACUGAA | 1365 | CUUCAGUCAACUUCUUAG | 1366 |
| | G | | | |
| miR-3654 | GACUGGACAAGCUGAGG | 1367 | UUCCUCAGCUUGUCCAGU | 1368 |
| | AA | | C | |
| miR-3655 | GCUUGUCGCUGCGGUGU | 1369 | AGCAACACCGCAGCGACA | 1370 |
| | UGCU | | AGC | |
| miR-3656 | GGCGGGUGCGGGGGUGG | 1371 | CCACCCCCGCACCCGCC | 1372 |
| miR-3657 | UGUGUCCCAUUAUUGGU | 1373 | AAUCACCAAUAAUGGGAC | 1374 |
| | GAUU | | ACA | |
| miR-3658 | UUUAAGAAAACACCAUG | 1375 | AUCUCCAUGGUGUUUUCU | 1376 |
| | GAGAU | | UAAA | |
| miR-3659 | UGAGUGUUGUCUACGAG | 1377 | UGCCCUCGUAGACAACAC | 1378 |
| | GGCA | | UCA | |
| miR-365a-3p | UAAUGCCCCUAAAAAUC | 1379 | AUAAGGAUUUUUAGGGG | 1380 |
| | CUUAU | | CAUUA | |
| miR-365a-5p | AGGGACUUUUGGGGGCA | 1381 | CACAUCUGCCCCCAAAAG | 1382 |
| | GAUGUG | | UCCCU | |
| miR-365b-3p | UAAUGCCCCUAAAAAUC | 1383 | AUAAGGAUUUUUAGGGG | 1384 |
| | CUUAU | | CAUUA | |
| miR-365b-5p | AGGGACUUUCAGGGGCA | 1385 | ACAGCUGCCCCUGAAAGU | 1386 |
| | GCUGU | | CCCU | |
| miR-3660 | ACUGACAGGAGAGCAUU | 1387 | UCAAAAUGCUCUCCUGUC | 1388 |
| | UUGA | | AGU | |
| miR-3661 | UGACCUGGGACUCGGAC | 1389 | CAGCUGUCCGAGUCCCAG | 1390 |
| | AGCUG | | GUCA | |
| miR-3662 | GAAAAUGAUGAGUAGUG | 1391 | CAUCAGUCACUACUCAUC | 1392 |
| | ACUGAUG | | AUUUUC | |
| miR-3663-3p | UGAGCACCACACAGGCC | 1393 | GCGCCCGGCCUGUGUGGU | 1394 |
| | GGGCGC | | GCUCA | |
| miR-3663-5p | GCUGGUCUGCGUGGUGC | 1395 | CCGAGCACCACGCAGACC | 1396 |
| | UCGG | | AGC | |
| miR-3664-3p | UCUCAGGAGUAAAGACA | 1397 | AACUCUGUCUUUACUCCU | 1398 |
| | GAGUU | | GAGA | |
| miR-3664-5p | AACUCUGUCUUCACUCA | 1399 | ACUCAUGAGUGAAGACAG | 1400 |
| | UGAGU | | AGUU | |
| miR-3665 | AGCAGGUGCGGGGCGGC | 1401 | CGCCGCCCCGCACCUGCU | 1402 |
| | G | | | |
| miR-3666 | CAGUGCAAGUGUAGAUG | 1403 | UCGGCAUCUACACUUGCA | 1404 |
| | CCGA | | CUG | |
| miR-3667-3p | ACCUUCCUCUCCAUGGG | 1405 | AAAGACCCAUGGAGAGGA | 1406 |
| | UCUUU | | AGGU | |
| miR-3667-5p | AAAGACCCAUUGAGGAG | 1407 | ACCUUCUCCUCAAUGGGU | 1408 |
| | AAGGU | | CUUU | |
| miR-3668 | AAUGUAGAGAUUGAUCA | 1409 | AUUUUGAUCAAUCUCUAC | 1410 |
| | AAAU | | AUU | |
| miR-3669 | ACGGAAUAUGUAUACGG | 1411 | UAUAUUCCGUAUACAUAU | 1412 |
| | AAUAUA | | UCCGU | |
| miR-367-3p | AAUUGCACUUUAGCAAU | 1413 | UCACCAUUGCUAAAGUGC | 1414 |
| | GGUGA | | AAUU | |
| miR-367-5p | ACUGUUGCUAAUAUGCA | 1415 | AGAGUUGCAUAUUAGCA | 1416 |
| | ACUCU | | ACAGU | |
| miR-3670 | AGAGCUCACAGCUGUCC | 1417 | UAGAGAAGGACAGCUGU | 1418 |
| | UUCUCUA | | GAGCUCU | |
| miR-3671 | AUCAAAUAAGGACUAGU | 1419 | UGCAGACUAGUCCUUAUU | 1420 |
| | CUGCA | | UGAU | |
| miR-3672 | AUGAGACUCAUGUAAAA | 1421 | AAGAUGUUUUACAUGAG | 1422 |
| | CAUCUU | | UCUCAU | |
| miR-3673 | AUGGAAUGUAUAUACGG | 1423 | UAUUCCGUAUAUACAUUC | 1424 |
| | AAUA | | CAU | |
| miR-3674 | AUUGUAGAACCUAAGAU | 1425 | GGCCAAUCUUAGGUUCUA | 1426 |
| | UGGCC | | CAAU | |
| miR-3675-3p | CAUCUCUAAGGAACUCC | 1427 | UUGGGGGAGUUCCUUAG | 1428 |
| | CCCAA | | AGAUG | |
| miR-3675-5p | UAUGGGGCUUCUGUAGA | 1429 | GAAAUCUCUACAGAAGCC | 1430 |
| | GAUUUC | | CCAUA | |
| miR-3676-3p | CCGUGUUUCCCCCACGC | 1431 | AAAGCGUGGGGGAAACAC | 1432 |
| | UUU | | GG | |
| miR-3676-5p | AGGAGAUCCUGGGUU | 1433 | AACCCAGGAUCUCCU | 1434 |
| miR-3677-3p | CUCGUGGGCUCUGGCCA | 1435 | GGCCGUGGCCAGAGCCCA | 1436 |
| | CGGCC | | CGAG | |
| miR-3677-5p | CAGUGGCCAGAGCCCUG | 1437 | CACUGCAGGGCUCUGGCC | 1438 |
| | CAGUG | | ACUG | |
| miR-3678-3p | CUGCAGAGUUUGUACGG | 1439 | CCGGUCCGUACAAACUCU | 1440 |
| | ACCGG | | GCAG | |
| miR-3678-5p | UCCGUACAAACUCUGCU | 1441 | CACAGCAGAGUUUGUACG | 1442 |
| | GUG | | GA | |
| miR-3679-3p | CUUCCCCCCAGUAAUCU | 1443 | GAUGAAGAUUACUGGGG | 1444 |
| | UCAUC | | GGAAG | |
| miR-3679-5p | UGAGGAUAUGGCAGGGA | 1445 | UCCCCUUCCCUGCCAUAU | 1446 |
| | AGGGGA | | CCUCA | |
| miR-3680-3p | UUUUGCAUGACCCUGGG | 1447 | CCUACUCCCAGGGUCAUG | 1448 |
| | AGUAGG | | CAAAA | |
| miR-3680-5p | GACUCACUCACAGGAUU | 1449 | UGCACAAUCCUGUGAGUG | 1450 |
| | GUGCA | | AGUC | |
| miR-3681-3p | ACACAGUGCUUCAUCCA | 1451 | AGUAGUGGAUGAAGCAC | 1452 |
| | CUACU | | UGUGU | |
| miR-3681-5p | UAGUGGAUGAUGCACUC | 1453 | GCACAGAGUGCAUCAUCC | 1454 |
| | UGUGC | | ACUA | |
| miR-3682-3p | UGAUGAUACAGGUGGAG | 1455 | CUACCUCCACCUGUAUCA | 1456 |
| | GUAG | | UCA | |
| miR-3682-5p | CUACUUCUACCUGUGUU | 1457 | AUGAUAACACAGGUAGA | 1458 |
| | AUCAU | | AGUAG | |
| miR-3683 | UGCGACAUUGGAAGUAG | 1459 | UGAUACUACUUCCAAUGU | 1460 |
| | UAUCA | | CGCA | |
| miR-3684 | UUAGACCUAGUACACGU | 1461 | AAGGACGUGUACUAGGUC | 1462 |
| | CCUU | | UAA | |
| miR-3685 | UUUCCUACCCUACCUGA | 1463 | AGUCUUCAGGUAGGGUA | 1464 |
| | AGACU | | GGAAA | |
| miR-3686 | AUCUGUAAGAGAAAGUA | 1465 | UCAUUUACUUUCUCUUAC | 1466 |
| | AAUGA | | AGAU | |
| miR-3687 | CCCGGACAGGCGUUCGU | 1467 | ACGUCGCACGAACGCCUG | 1468 |
| | GCGACGU | | UCCGGG | |
| miR-3688-3p | UAUGGAAAGACUUUGCC | 1469 | AGAGUGGCAAAGUCUUUC | 1470 |
| | ACUCU | | CAUA | |
| miR-3688-5p | AGUGGCAAAGUCUUUCC | 1471 | AUAUGGAAAGACUUUGCC | 1472 |
| | AUAU | | ACU | |
| miR-3689a-3p | CUGGGAGGUGUGAUAUC | 1473 | ACCACGAUAUCACACCUC | 1474 |
| | GUGGU | | CCAG | |
| miR-3689a-5p | UGUGAUAUCAUGGUUCC | 1475 | UCCCAGGAACCAUGAUAU | 1476 |
| | UGGGA | | CACA | |
| miR-3689b-3p | CUGGGAGGUGUGAUAUU | 1477 | ACCACAAUAUCACACCUC | 1478 |
| | GUGGU | | CCAG | |
| miR-3689b-5p | UGUGAUAUCAUGGUUCC | 1479 | UCCCAGGAACCAUGAUAU | 1480 |
| | UGGGA | | CACA | |
| miR-3689c | CUGGGAGGUGUGAUAUU | 1481 | ACCACAAUAUCACACCUC | 1482 |
| | GUGGU | | CCAG | |
| miR-3689d | GGGAGGUGUGAUCUCAC | 1483 | CGAGUGUGAGAUCACACC | 1484 |
| | ACUCG | | UCCC | |
| miR-3689e | UGUGAUAUCAUGGUUCC | 1485 | UCCCAGGAACCAUGAUAU | 1486 |
| | UGGGA | | CACA | |
| miR-3689f | UGUGAUAUCGUGCUUCC | 1487 | UCCCAGGAAGCACGAUAU | 1488 |
| | UGGGA | | CACA | |
| miR-369-3p | AAUAAUACAUGGUUGAU | 1489 | AAAGAUCAACCAUGUAUU | 1490 |
| | CUUU | | AUU | |
| miR-369-5p | AGAUCGACCGUGUUAUA | 1491 | GCGAAUAUAACACGGUCG | 1492 |
| | UUCGC | | AUCU | |
| miR-3690 | ACCUGGACCCAGCGUAG | 1493 | CUUUGUCUACGCUGGGUC | 1494 |
| | ACAAAG | | CAGGU | |
| miR-3691-3p | ACCAAGUCUGCGUCAUC | 1495 | GAGAGGAUGACGCAGACU | 1496 |
| | CUCUC | | UGGU | |
| miR-3691-5p | AGUGGAUGAUGGAGACU | 1497 | GUACCGAGUCUCCAUCAU | 1498 |
| | CGGUAC | | CCACU | |
| miR-3692-3p | GUUCCACACUGACACUG | 1499 | ACUUCUGCAGUGUCAGUG | 1500 |
| | CAGAAGU | | UGGAAC | |
| miR-3692-5p | CCUGCUGGUCAGGAGUG | 1501 | CAGUAUCCACUCCUGACC | 1502 |
| | GAUACUG | | AGCAGG | |
| miR-370 | GCCUGCUGGGGUGGAAC | 1503 | ACCAGGUUCCACCCCAGC | 1504 |
| | CUGGU | | AGGC | |
| miR-3713 | GGUAUCCGUUUGGGGAU | 1505 | ACCAUCCCCAAACGGAUA | 1506 |
| | GGU | | CC | |
| miR-3714 | GAAGGCAGCAGUGCUCC | 1507 | ACAGGGGAGCACUGCUGC | 1508 |
| | CCUGU | | CUUC | |
| miR-371a-3p | AAGUGCCGCCAUCUUUU | 1509 | ACACUCAAAAGAUGGCGG | 1510 |
| | GAGUGU | | CACUU | |
| miR-371a-5p | ACUCAAACUGUGGGGGC | 1511 | AGUGCCCCCACAGUUUGA | 1512 |
| | ACU | | GU | |
| miR-371b-3p | AAGUGCCCCCACAGUUU | 1513 | GCACUCAAACUGUGGGGG | 1514 |
| | GAGUGC | | CACUU | |
| miR-371b-5p | ACUCAAAAGAUGGCGGC | 1515 | AAAGUGCCGCCAUCUUUU | 1516 |
| | ACUUU | | GAGU | |
| miR-372 | AAAGUGCUGCGACAUUU | 1517 | ACGCUCAAAUGUCGCAGC | 1518 |
| | GAGCGU | | ACUUU | |
| miR-373-3p | GAAGUGCUUCGAUUUUG | 1519 | ACACCCCAAAAUCGAAGC | 1520 |
| | GGGUGU | | ACUUC | |
| miR-373-5p | ACUCAAAAUGGGGGCGC | 1521 | GGAAAGCGCCCCCAUUUU | 1522 |
| | UUUCC | | GAGU | |
| miR-374a-3p | CUUAUCAGAUUGUAUUG | 1523 | AAUUACAAUACAAUCUGA | 1524 |
| | UAAUU | | UAAG | |
| miR-374a-5p | UUAUAAUACAACCUGAU | 1525 | CACUUAUCAGGUUGUAUU | 1526 |
| | AAGUG | | AUAA | |
| miR-374b-3p | CUUAGCAGGUUGUAUUA | 1527 | AAUGAUAAUACAACCUGC | 1528 |
| | UCAUU | | UAAG | |
| miR-374b-5p | AUAUAAUACAACCUGCU | 1529 | CACUUAGCAGGUUGUAUU | 1530 |
| | AAGUG | | AUAU | |
| miR-374c-3p | CACUUAGCAGGUUGUAU | 1531 | AUAUAAUACAACCUGCUA | 1532 |
| | UAUAU | | AGUG | |
| miR-374c-5p | AUAAUACAACCUGCUAA | 1533 | AGCACUUAGCAGGUUGUA | 1534 |
| | GUGCU | | UUAU | |
| miR-375 | UUUGUUCGUUCGGCUCG | 1535 | UCACGCGAGCCGAACGAA | 1536 |
| | CGUGA | | CAAA | |
| miR-376a-3p | AUCAUAGAGGAAAAUCC | 1537 | ACGUGGAUUUUCCUCUAU | 1538 |
| | ACGU | | GAU | |
| miR-376a-5p | GUAGAUUCUCCUUCUAU | 1539 | UACUCAUAGAAGGAGAA | 1540 |
| | GAGUA | | UCUAC | |
| miR-376b | AUCAUAGAGGAAAAUCC | 1541 | AACAUGGAUUUUCCUCUA | 1542 |
| | AUGUU | | UGAU | |
| miR-376c | AACAUAGAGGAAAUUCC | 1543 | ACGUGGAAUUUCCUCUAU | 1544 |
| | ACGU | | GUU | |
| miR-377-3p | AUCACACAAAGGCAACU | 1545 | ACAAAAGUUGCCUUUGUG | 1546 |
| | UUUGU | | UGAU | |
| miR-377-5p | AGAGGUUGCCCUUGGUG | 1547 | GAAUUCACCAAGGGCAAC | 1548 |
| | AAUUC | | CUCU | |
| miR-378a-3p | ACUGGACUUGGAGUCAG | 1549 | CCUUCUGACUCCAAGUCC | 1550 |
| | AAGG | | AGU | |
| miR-378a-5p | CUCCUGACUCCAGGUCC | 1551 | ACACAGGACCUGGAGUCA | 1552 |
| | UGUGU | | GGAG | |
| miR-378b | ACUGGACUUGGAGGCAG | 1553 | UUCUGCCUCCAAGUCCAG | 1554 |
| | AA | | U | |
| miR-378c | ACUGGACUUGGAGUCAG | 1555 | CCACUCUUCUGACUCCAA | 1556 |
| | AAGAGUGG | | GUCCAGU | |
| miR-378d | ACUGGACUUGGAGUCAG | 1557 | UUUCUGACUCCAAGUCCA | 1558 |
| | AAA | | GU | |
| miR-378e | ACUGGACUUGGAGUCAG | 1559 | UCCUGACUCCAAGUCCAG | 1560 |
| | GA | | U | |
| miR-378f | ACUGGACUUGGAGCCAG | 1561 | CUUCUGGCUCCAAGUCCA | 1562 |
| | AAG | | GU | |
| miR-378g | ACUGGGCUUGGAGUCAG | 1563 | CUUCUGACUCCAAGCCCA | 1564 |
| | AAG | | GU | |
| miR-378h | ACUGGACUUGGUGUCAG | 1565 | CCAUCUGACACCAAGUCC | 1566 |
| | AUGG | | AGU | |
| miR-378i | ACUGGACUAGGAGUCAG | 1567 | CCUUCUGACUCCUAGUCC | 1568 |
| | AAGG | | AGU | |
| miR-379-3p | UAUGUAACAUGGUCCAC | 1569 | AGUUAGUGGACCAUGUU | 1570 |
| | UAACU | | ACAUA | |
| miR-379-5p | UGGUAGACUAUGGAACG | 1571 | CCUACGUUCCAUAGUCUA | 1572 |
| | UAGG | | CCA | |
| miR-380-3p | UAUGUAAUAUGGUCCAC | 1573 | AAGAUGUGGACCAUAUU | 1574 |
| | AUCUU | | ACAUA | |
| miR-380-5p | UGGUUGACCAUAGAACA | 1575 | GCGCAUGUUCUAUGGUCA | 1576 |
| | UGCGC | | ACCA | |
| miR-381 | UAUACAAGGGCAAGCUC | 1577 | ACAGAGAGCUUGCCCUUG | 1578 |
| | UCUGU | | UAUA | |
| miR-382-3p | AAUCAUUCACGGACAAC | 1579 | AAGUGUUGUCCGUGAAU | 1580 |
| | ACUU | | GAUU | |
| miR-382-5p | GAAGUUGUUCGUGGUGG | 1581 | CGAAUCCACCACGAACAA | 1582 |
| | AUUCG | | CUUC | |
| miR-383 | AGAUCAGAAGGUGAUUG | 1583 | AGCCACAAUCACCUUCUG | 1584 |
| | UGGCU | | AUCU | |
| miR-384 | AUUCCUAGAAAUUGUUC | 1585 | UAUGAACAAUUUCUAGG | 1586 |
| | AUA | | AAU | |
| miR-3907 | AGGUGCUCCAGGCUGGC | 1587 | UGUGAGCCAGCCUGGAGC | 1588 |
| | UCACA | | ACCU | |
| miR-3908 | GAGCAAUGUAGGUAGAC | 1589 | AAACAGUCUACCUACAUU | 1590 |
| | UGUUU | | GCUC | |
| miR-3909 | UGUCCUCUAGGGCCUGC | 1591 | AGACUGCAGGCCCUAGAG | 1592 |
| | AGUCU | | GACA | |
| miR-3910 | AAAGGCAUAAAACCAAG | 1593 | UGUCUUGGUUUUAUGCCU | 1594 |
| | ACA | | UU | |
| miR-3911 | UGUGUGGAUCCUGGAGG | 1595 | UGCCUCCUCCAGGAUCCA | 1596 |
| | AGGCA | | CACA | |
| miR-3912 | UAACGCAUAAUAUGGAC | 1597 | ACAUGUCCAUAUUAUGCG | 1598 |
| | AUGU | | UUA | |
| miR-3913-3p | AGACAUCAAGAUCAGUC | 1599 | UUUGGGACUGAUCUUGA | 1600 |
| | CCAAA | | UGUCU | |
| miR-3913-5p | UUUGGGACUGAUCUUGA | 1601 | AGACAUCAAGAUCAGUCC | 1602 |
| | UGUCU | | CAAA | |
| miR-3914 | AAGGAACCAGAAAAUGA | 1603 | ACUUCUCAUUUUCUGGUU | 1604 |
| | GAAGU | | CCUU | |
| miR-3915 | UUGAGGAAAAGAUGGUC | 1605 | AAUAAGACCAUCUUUUCC | 1606 |
| | UUAUU | | UCAA | |
| miR-3916 | AAGAGGAAGAAAUGGCU | 1607 | CUGAGAACCAGCCAUUUC | 1608 |
| | GGUUCUCAG | | UUCCUCUU | |
| miR-3917 | GCUCGGACUGAGCAGGU | 1609 | CCCACCUGCUCAGUCCGA | 1610 |
| | GGG | | GC | |
| miR-3918 | ACAGGGCCGCAGAUGGA | 1611 | AGUCUCCAUCUGCGGCCC | 1612 |
| | GACU | | UGU | |
| miR-3919 | GCAGAGAACAAAGGACU | 1613 | ACUGAGUCCUUUGUUCUC | 1614 |
| | CAGU | | UGC | |
| miR-3920 | ACUGAUUAUCUUAACUC | 1615 | UCAGAGAGUUAAGAUAA | 1616 |
| | UCUGA | | UCAGU | |
| miR-3921 | UCUCUGAGUACCAUAUG | 1617 | ACAAGGCAUAUGGUACUC | 1618 |
| | CCUUGU | | AGAGA | |
| miR-3922-3p | UCUGGCCUUGACUUGAC | 1619 | AAAGAGUCAAGUCAAGGC | 1620 |
| | UCUUU | | CAGA | |
| miR-3922-5p | UCAAGGCCAGAGGUCCC | 1621 | UGCUGUGGGACCUCUGGC | 1622 |
| | ACAGCA | | CUUGA | |
| miR-3923 | AACUAGUAAUGUUGGAU | 1623 | CCCUAAUCCAACAUUACU | 1624 |
| | UAGGG | | AGUU | |
| miR-3924 | AUAUGUAUAUGUGACUG | 1625 | AGUAGCAGUCACAUAUAC | 1626 |
| | CUACU | | AUAU | |
| miR-3925-3p | ACUCCAGUUUUAGUUCU | 1627 | CAAGAGAACUAAAACUGG | 1628 |
| | CUUG | | AGU | |
| miR-3925-5p | AAGAGAACUGAAAGUGG | 1629 | AGGCUCCACUUUCAGUUC | 1630 |
| | AGCCU | | UCUU | |
| miR-3926 | UGGCCAAAAAGCAGGCA | 1631 | UCUCUGCCUGCUUUUUGG | 1632 |
| | GAGA | | CCA | |
| miR-3927 | CAGGUAGAUAUUUGAUA | 1633 | AUGCCUAUCAAAUAUCUA | 1634 |
| | GGCAU | | CCUG | |
| miR-3928 | GGAGGAACCUUGGAGCU | 1635 | GCCGAAGCUCCAAGGUUC | 1636 |
| | UCGGC | | CUCC | |
| miR-3929 | GAGGCUGAUGUGAGUAG | 1637 | AGUGGUCUACUCACAUCA | 1638 |
| | ACCACU | | GCCUC | |
| miR-3934 | UCAGGUGUGGAAACUGA | 1639 | CUGCCUCAGUUUCCACAC | 1640 |
| | GGCAG | | CUGA | |
| miR-3935 | UGUAGAUACGAGCACCA | 1641 | GUGGCUGGUGCUCGUAUC | 1642 |
| | GCCAC | | UACA | |
| miR-3936 | UAAGGGGUGUAUGGCAG | 1643 | UGCAUCUGCCAUACACCC | 1644 |
| | AUGCA | | CUUA | |
| miR-3937 | ACAGGCGGCUGUAGCAA | 1645 | CCCCCAUUGCUACAGCCG | 1646 |
| | UGGGGG | | CCUGU | |
| miR-3938 | AAUUCCCUUGUAGAUAA | 1647 | CCGGGUUAUCUACAAGGG | 1648 |
| | CCCGG | | AAUU | |
| miR-3939 | UACGCGCAGACCACAGG | 1649 | GACAUCCUGUGGUCUGCG | 1650 |
| | AUGUC | | CGUA | |
| miR-3940-3p | CAGCCCGGAUCCCAGCC | 1651 | AAGUGGGCUGGGAUCCGG | 1652 |
| | CACUU | | GCUG | |
| miR-3940-5p | GUGGGUUGGGGCGGGCU | 1653 | CAGAGCCCGCCCCAACCC | 1654 |
| | CUG | | AC | |
| miR-3941 | UUACACACAACUGAGGA | 1655 | UAUGAUCCUCAGUUGUGU | 1656 |
| | UCAUA | | GUAA | |
| miR-3942-3p | UUUCAGAUAACAGUAUU | 1657 | AUGUAAUACUGUUAUCU | 1658 |
| | ACAU | | GAAA | |
| miR-3942-5p | AAGCAAUACUGUUACCU | 1659 | AUUUCAGGUAACAGUAU | 1660 |
| | GAAAU | | UGCUU | |
| miR-3943 | UAGCCCCCAGGCUUCAC | 1661 | CGCCAAGUGAAGCCUGGG | 1662 |
| | UUGGCG | | GGCUA | |
| miR-3944-3p | UUCGGGCUGGCCUGCUG | 1663 | CCGGAGCAGCAGGCCAGC | 1664 |
| | CUCCGG | | CCGAA | |
| miR-3944-5p | UGUGCAGCAGGCCAACC | 1665 | UCUCGGUUGGCCUGCUGC | 1666 |
| | GAGA | | ACA | |
| miR-3945 | AGGGCAUAGGAGAGGGU | 1667 | AUAUCAACCCUCUCCUAU | 1668 |
| | UGAUAU | | GCCCU | |
| miR-3960 | GGCGGCGGCGGAGGCGG | 1669 | CCCCCGCCTCCGCCGCCGC | 1670 |
| | GGG | | C | |
| miR-3972 | CUGCCAGCCCCGUUCCA | 1671 | UGCCCUGGAACGGGGCUG | 1672 |
| | GGGCA | | GCAG | |
| miR-3973 | ACAAAGUACAGCAUUAG | 1673 | CUAAGGCUAAUGCUGUAC | 1674 |
| | CCUUAG | | UUUGU | |
| miR-3974 | AAAGGUCAUUGUAAGGU | 1675 | GCAUUAACCUUACAAUGA | 1676 |
| | UAAUGC | | CCUUU | |
| miR-3975 | UGAGGCUAAUGCACUAC | 1677 | GUGAAGUAGUGCAUUAG | 1678 |
| | UUCAC | | CCUCA | |
| miR-3976 | UAUAGAGAGCAGGAAGA | 1679 | ACAUUAAUCUUCCUGCUC | 1680 |
| | UUAAUGU | | UCUAUA | |
| miR-3977 | GUGCUUCAUCGUAAUUA | 1681 | UAAGGUUAAUUACGAUG | 1682 |
| | ACCUUA | | AAGCAC | |
| miR-3978 | GUGGAAAGCAUGCAUCC | 1683 | ACACCCUGGAUGCAUGCU | 1684 |
| | AGGGUGU | | UUCCAC | |
| miR-409-3p | GAAUGUUGCUCGGUGAA | 1685 | AGGGGUUCACCGAGCAAC | 1686 |
| | CCCCU | | AUUC | |
| miR-409-5p | AGGUUACCCGAGCAACU | 1687 | AUGCAAAGUUGCUCGGGU | 1688 |
| | UUGCAU | | AACCU | |
| miR-410 | AAUAUAACACAGAUGGC | 1689 | ACAGGCCAUCUGUGUUAU | 1690 |
| | CUGU | | AUU | |
| miR-411-3p | UAUGUAACACGGUCCAC | 1691 | GGUUAGUGGACCGUGUU | 1692 |
| | UAACC | | ACAUA | |
| miR-411-5p | UAGUAGACCGUAUAGCG | 1693 | CGUACGCUAUACGGUCUA | 1694 |
| | UACG | | CUA | |
| miR-412 | ACUUCACCUGGUCCACU | 1695 | ACGGCUAGUGGACCAGGU | 1696 |
| | AGCCGU | | GAAGU | |
| miR-421 | AUCAACAGACAUUAAUU | 1697 | GCGCCCAAUUAAUGUCUG | 1698 |
| | GGGCGC | | UUGAU | |
| miR-422a | ACUGGACUUAGGGUCAG | 1699 | GCCUUCUGACCCUAAGUC | 1700 |
| | AAGGC | | CAGU | |
| miR-423-3p | AGCUCGGUCUGAGGCCC | 1701 | ACUGAGGGGCCUCAGACC | 1702 |
| | CUCAGU | | GAGCU | |
| miR-423-5p | UGAGGGGCAGAGAGCGA | 1703 | AAAGUCUCGCUCUCUGCC | 1704 |
| | GACUUU | | CCUCA | |
| miR-424-3p | CAAAACGUGAGGCGCUG | 1705 | AUAGCAGCGCCUCACGUU | 1706 |
| | CUAU | | UUG | |
| miR-424-5p | CAGCAGCAAUUCAUGUU | 1707 | UUCAAAACAUGAAUUGCU | 1708 |
| | UUGAA | | GCUG | |
| miR-425-3p | AUCGGGAAUGUCGUGUC | 1709 | GGGCGGACACGACAUUCC | 1710 |
| | CGCCC | | CGAU | |
| miR-425-5p | AAUGACACGAUCACUCC | 1711 | UCAACGGGAGUGAUCGUG | 1712 |
| | CGUUGA | | UCAUU | |
| miR-4251 | CCUGAGAAAAGGGCCAA | 1713 | UUGGCCCUUUUCUCAGG | 1714 |
| miR-4252 | GGCCACUGAGUCAGCAC | 1715 | UGGUGCUGACUCAGUGGC | |
| | CA | | C | 1716 |
| miR-4253 | AGGGCAUGUCCAGGGGG | 1717 | ACCCCCUGGACAUGCCCU | 1718 |
| | U | | | |
| miR-4254 | GCCUGGAGCUACUCCAC | 1719 | GAGAUGGUGGAGUAGCU | 1720 |
| | CAUCUC | | CCAGGC | |
| miR-4255 | CAGUGUUCAGAGAUGGA | 1721 | UCCAUCUCUGAACACUG | 1722 |
| miR-4256 | AUCUGACCUGAUGAAGG | 1723 | ACCUUCAUCAGGUCAGAU | 1724 |
| | U | | | |
| miR-4257 | CCAGAGGUGGGGACUGA | 1725 | CUCAGUCCCCACCUCUGG | 1726 |
| | G | | | |
| miR-4258 | CCCCGCCACCGCCUUGG | 1727 | CCAAGGCGGUGGCGGGG | 1728 |
| miR-4259 | CAGUUGGGUCUAGGGGU | 1729 | UCCUGACCCCUAGACCCA | 1730 |
| | CAGGA | | ACUG | |
| miR-4260 | CUUGGGGCAUGGAGUCC | 1731 | UGGGACUCCAUGCCCCAA | 1732 |
| | CA | | G | |
| miR-4261 | AGGAAACAGGGACCCA | 1733 | TGGGTCCCTGTTTCCT | 1734 |
| miR-4262 | GACAUUCAGACUACCUG | 1735 | CAGGUAGUCUGAAUGUC | 1736 |
| miR-4263 | AUUCUAAGUGCCUUGGC | 1737 | GGCCAAGGCACUUAGAAU | 1738 |
| | C | | | |
| miR-4264 | ACUCAGUCAUGGUCAUU | 1739 | AAUGACCAUGACUGAGU | 1740 |
| miR-4265 | CUGUGGGCUCAGCUCUG | 1741 | CCCAGAGCUGAGCCCACA | 1742 |
| | GG | | G | |
| miR-4266 | CUAGGAGGCCUUGGCC | 1743 | GGCCAAGGCCUCCUAG | 1744 |
| miR-4267 | UCCAGCUCGGUGGCAC | 1745 | GUGCCACCGAGCUGGA | 1746 |
| miR-4268 | GGCUCCUCCUCUCAGGA | 1747 | CACAUCCUGAGAGGAGGA | 1748 |
| | UGUG | | GCC | |
| miR-4269 | GCAGGCACAGACAGCCC | 1749 | GCCAGGGCUGUCUGUGCC | 1750 |
| | UGGC | | UGC | |
| miR-4270 | UCAGGGAGUCAGGGGAG | 1751 | GCCCUCCCCUGACUCCCU | 1752 |
| | GGC | | GA | |
| miR-4271 | GGGGGAAGAAAAGGUGG | 1753 | CCCCACCUUUUCUUCCCC | 1754 |
| | GG | | C | |
| miR-4272 | CAUUCAACUAGUGAUUG | 1755 | ACAAUCACUAGUUGAAUG | 1756 |
| | U | | | |
| miR-4273 | GUGUUCUCUGAUGGACA | 1757 | CUGUCCAUCAGAGAACAC | 1758 |
| | G | | | |
| miR-4274 | CAGCAGUCCCUCCCCCU | 1759 | CAGGGGGAGGGACUGCUG | 1760 |
| | G | | | |
| miR-4275 | CCAAUUACCACUUCUUU | 1761 | AAAGAAGUGGUAAUUGG | 1762 |
| miR-4276 | CUCAGUGACUCAUGUGC | 1763 | GCACAUGAGUCACUGAG | 1764 |
| miR-4277 | GCAGUUCUGAGCACAGU | 1765 | GUGUACUGUGCUCAGAAC | 1766 |
| | ACAC | | UGC | |
| miR-4278 | CUAGGGGGUUUGCCCUU | 1767 | CAAGGGCAAACCCCCUAG | 1768 |
| | G | | | |
| miR-4279 | CUCUCCUCCCGGCUUC | 1769 | GAAGCCGGGAGGAGAG | 1770 |
| miR-4280 | GAGUGUAGUUCUGAGCA | 1771 | GCUCUGCUCAGAACUACA | 1772 |
| | GAGC | | CUC | |
| miR-4281 | GGGUCCCGGGGAGGGGG | 1773 | CCCCCCUCCCCGGGACCC | 1774 |
| | G | | | |
| miR-4282 | UAAAAUUUGCAUCCAGG | 1775 | UCCUGGAUGCAAAUUUUA | 1776 |
| | A | | | |
| miR-4283 | UGGGGCUCAGCGAGUUU | 1777 | AAACUCGCUGAGCCCCA | 1778 |
| miR-4284 | GGGCUCACAUCACCCCA | 1779 | AUGGGGUGAUGUGAGCCC | 1780 |
| | U | | | |
| miR-4285 | GCGGCGAGUCCGACUCA | 1781 | AUGAGUCGGACUCGCCGC | 1782 |
| | U | | | |
| miR-4286 | ACCCCACUCCUGGUACC | 1783 | GGUACCAGGAGUGGGGU | 1784 |
| miR-4287 | UCUCCCUUGAGGGCACU | 1785 | AAAGUGCCCUCAAGGGAG | 1786 |
| | UU | | A | |
| miR-4288 | UUGUCUGCUGAGUUUCC | 1787 | GGAAACUCAGCAGACAA | 1788 |
| miR-4289 | GCAUUGUGCAGGGCUAU | 1789 | UGAUAGCCCUGCACAAUG | 1790 |
| | CA | | C | |
| miR-429 | UAAUACUGUCUGGUAAA | 1791 | ACGGUUUUACCAGACAGU | 1792 |
| | ACCGU | | AUUA | |
| miR-4290 | UGCCCUCCUUUCUUCCC | 1793 | GAGGGAAGAAAGGAGGG | 1794 |
| | UC | | CA | |
| miR-4291 | UUCAGCAGGAACAGCU | 1795 | AGCUGUUCCUGCUGAA | 1796 |
| miR-4292 | CCCCUGGGCCGGCCUUG | 1797 | CCAAGGCCGGCCCAGGGG | 1798 |
| | G | | | |
| miR-4293 | CAGCCUGACAGGAACAG | 1799 | CUGUUCCUGUCAGGCUG | 1800 |
| miR-4294 | GGGAGUCUACAGCAGGG | 1801 | CCCUGCUGUAGACUCCC | 1802 |
| miR-4295 | CAGUGCAAUGUUUUCCU | 1803 | AAGGAAAACAUUGCACUG | 1804 |
| | U | | | |
| miR-4296 | AUGUGGGCUCAGGCUCA | 1805 | UGAGCCUGAGCCCACAU | 1806 |
| miR-4297 | UGCCUUCCUGUCUGUG | 1807 | CACAGACAGGAAGGCA | 1808 |
| miR-4298 | CUGGGACAGGAGGAGGA | 1809 | CUGCCUCCUCCUCCUGUC | 1810 |
| | GGCAG | | CCAG | |
| miR-4299 | GCUGGUGACAUGAGAGG | 1811 | GCCUCUCAUGUCACCAGC | 1812 |
| | C | | | |
| miR-4300 | UGGGAGCUGGACUACUU | 1813 | GAAGUAGUCCAGCUCCCA | 1814 |
| | C | | | |
| miR-4301 | UCCCACUACUUCACUUG | 1815 | UCACAAGUGAAGUAGUG | 1816 |
| | UGA | | GGA | |
| miR-4302 | CCAGUGUGGCUCAGCGA | 1817 | CUCGCUGAGCCACACUGG | 1818 |
| | G | | | |
| miR-4303 | UUCUGAGCUGAGGACAG | 1819 | CUGUCCUCAGCUCAGAA | 1820 |
| miR-4304 | CCGGCAUGUCCAGGGCA | 1821 | UGCCCUGGACAUGCCGG | 1822 |
| miR-4305 | CCUAGACACCUCCAGUU | 1823 | GAACUGGAGGUGUCUAG | 1824 |
| | C | | G | |
| miR-4306 | UGGAGAGAAAGGCAGUA | 1825 | UACUGCCUUUCUCUCCA | 1826 |
| miR-4307 | AAUGUUUUUUCCUGUUU | 1827 | GGAAACAGGAAAAAACA | 1828 |
| | CC | | UU | |
| miR-4308 | UCCCUGGAGUUUCUUCU | 1829 | AAGAAGAAACUCCAGGGA | 1830 |
| | U | | | |
| miR-4309 | CUGGAGUCUAGGAUUCC | 1831 | UGGAAUCCUAGACUCCAG | 1832 |
| | A | | | |
| miR-431-3p | CAGGUCGUCUUGCAGGG | 1833 | AGAAGCCCUGCAAGACGA | 1834 |
| | CUUCU | | CCUG | |
| miR-431-5p | UGUCUUGCAGGCCGUCA | 1835 | UGCAUGACGGCCUGCAAG | 1836 |
| | UGCA | | ACA | |
| miR-4310 | GCAGCAUUCAUGUCCC | 1837 | GGGACAUGAAUGCUGC | 1838 |
| miR-4311 | GAAAGAGAGCUGAGUGU | 1839 | CACACUCAGCUCUCUUUC | 1840 |
| | G | | | |
| miR-4312 | GCCUUGUUCCUGUCCC | 1841 | UGGGGACAGGAACAAGGC | 1842 |
| | CA | | C | |
| miR-4313 | AGCCCCCUGGCCCCAAA | 1843 | GGGUUUGGGGCCAGGGG | 1844 |
| | CCC | | GCU | |
| miR-4314 | CUCUGGGAAAUGGGACA | 1845 | CUGUCCCAUUUCCCAGAG | 1846 |
| | G | | | |
| miR-4315 | CCGCUUUCUGAGCUGGA | 1847 | GUCCAGCUCAGAAAGCGG | 1848 |
| | C | | | |
| miR-4316 | GGUGAGGCUAGCUGGUG | 1849 | CACCAGCUAGCCUCACC | 1850 |
| miR-4317 | ACAUUGCCAGGGAGUUU | 1851 | AAACUCCCUGGCAAUGU | 1852 |
| miR-4318 | CACUGUGGGUACAUGCU | 1853 | AGCAUGUACCCACAGUG | 1854 |
| miR-4319 | UCCCUGAGCAAAGCCAC | 1855 | GUGGCUUUGCUCAGGGA | 1856 |
| miR-432-3p | CUGGAUGGCUCCUCCAU | 1857 | AGACAUGGAGGAGCCAUC | 1858 |
| | GUCU | | CAG | |
| miR-432-5p | UCUUGGAGUAGGUCAUU | 1859 | CCACCCAAUGACCUACUC | 1860 |
| | GGGUGG | | CAAGA | |
| miR-4320 | GGGAUUCUGUAGCUUCC | 1861 | AGGAAGCUACAGAAUCCC | 1862 |
| | U | | | |
| miR-4321 | UUAGCGGUGGACCGCCC | 1863 | CGCAGGGCGGUCCACCGC | 1864 |
| | UGCG | | UAA | |
| miR-4322 | CUGUGGGCUCAGCGCGU | 1865 | CCCCACGCGCUGAGCCCA | 1866 |
| | GGGG | | CAG | |
| miR-4323 | CAGCCCCACAGCCUCAG | 1867 | UCUGAGGCUGUGGGGCUG | 1868 |
| | A | | | |
| miR-4324 | CCCUGAGACCCUAACCU | 1869 | UUAAGGUUAGGGUCUCA | 1870 |
| | UAA | | GGG | |
| miR-4325 | UUGCACUUGUCUCAGUG | 1871 | UCACUGAGACAAGUGCAA | 1872 |
| | A | | | |
| miR-4326 | UGUUCCUCUGUCUCCCA | 1873 | GUCUGGGAGACAGAGGA | 1874 |
| | GAC | | ACA | |
| miR-4327 | GGCUUGCAUGGGGGACU | 1875 | CCAGUCCCCCAUGCAAGC | 1876 |
| | GG | | C | |
| miR-4328 | CCAGUUUUCCCAGGAUU | 1877 | AAUCCUGGGAAAACUGG | 1878 |
| miR-4329 | CCUGAGACCCUAGUUCC | 1879 | GUGGAACUAGGGUCUCAG | 1880 |
| | AC | | G | |
| miR-433 | AUCAUGAUGGGCUCCUC | 1881 | ACACCGAGGAGCCCAUCA | 1882 |
| | GGUGU | | UGAU | |
| miR-4330 | CCUCAGAUCAGAGCCUU | 1883 | GCAAGGCUCUGAUCUGAG | 1884 |
| | GC | | G | |
| miR-4417 | GGUGGGCUUCCCGGAGG | 1885 | CCCUCCGGGAAGCCCACC | 1886 |
| | G | | | |
| miR-4418 | CACUGCAGGACUCAGCA | 1887 | CUGCUGAGUCCUGCAGUG | 1888 |
| | G | | | |
| miR-4419a | UGAGGGAGGAGACUGCA | 1889 | UGCAGUCUCCUCCCUCA | 1890 |
| miR-4419b | GAGGCUGAAGGAAGAUG | 1891 | CCAUCUUCCUUCAGCCUC | 1892 |
| | G | | | |
| miR-4420 | GUCACUGAUGUCUGUAG | 1893 | CUCAGCUACAGACAUCAG | 1894 |
| | CUGAG | | UGAC | |
| miR-4421 | ACCUGUCUGUGGAAAGG | 1895 | UAGCUCCUUUCCACAGAC | 1896 |
| | AGCUA | | AGGU | |
| miR-4422 | AAAAGCAUCAGGAAGUA | 1897 | UGGGUACUUCCUGAUGCU | 1898 |
| | CCCA | | UUU | |
| miR-4423-3p | AUAGGCACCAAAAAGCA | 1899 | UUGUUGCUUUUUGGUGCC | 1900 |
| | ACAA | | UAU | |
| miR-4423-5p | AGUUGCCUUUUUGUUCC | 1901 | GCAUGGGAACAAAAAGGC | 1902 |
| | CAUGC | | AACU | |
| miR-4424 | AGAGUUAACUCAAAAUG | 1903 | UAGUCCAUUUUGAGUUA | 1904 |
| | GACUA | | ACUCU | |
| miR-4425 | UGUUGGGAUUCAGCAGG | 1905 | AUGGUCCUGCUGAAUCCC | 1906 |
| | ACCAU | | AACA | |
| miR-4426 | GAAGAUGGACGUACUUU | 1907 | AAAGUACGUCCAUCUUC | 1908 |
| miR-4427 | UCUGAAUAGAGUCUGAA | 1909 | ACUCUUCAGACUCUAUUC | 1910 |
| | GAGU | | AGA | |
| miR-4428 | CAAGGAGACGGGAACAU | 1911 | GCUCCAUGUUCCCGUCUC | 1912 |
| | GGAGC | | CUUG | |
| miR-4429 | AAAAGCUGGGCUGAGAG | 1913 | CGCCUCUCAGCCCAGCUU | 1914 |
| | GCG | | UU | |
| miR-4430 | AGGCUGGAGUGAGCGGA | 1915 | CUCCGCUCACUCCAGCCU | 1916 |
| | G | | | |
| miR-4431 | GCGACUCUGAAAACUAG | 1917 | ACCUUCUAGUUUUCAGAG | 1918 |
| | AAGGU | | UCGC | |
| miR-4432 | AAAGACUCUGCAAGAUG | 1919 | AGGCAUCUUGCAGAGUCU | 1920 |
| | CCU | | UU | |
| miR-4433-3p | ACAGGAGUGGGGGUGGG | 1921 | AUGUCCCACCCCCACUCC | 1922 |
| | ACAU | | UGU | |
| miR-4433-5p | CGUCCCACCCCCCACUCC | 1923 | ACAGGAGUGGGGGGUGG | 1924 |
| | UGU | | GACG | |
| miR-4434 | AGGAGAAGUAAAGUAGA | 1925 | UUCUACUUUACUUCUCCU | 1926 |
| | A | | | |
| miR-4435 | AUGGCCAGAGCUCACAC | 1927 | CCUCUGUGUGAGCUCUGG | 1928 |
| | AGAGG | | CCAU | |
| miR-4436a | GCAGGACAGGCAGAAGU | 1929 | AUCCACUUCUGCCUGUCC | 1930 |
| | GGAU | | UGC | |
| miR-4436b-3p | CAGGGCAGGAAGAAGUG | 1931 | UUGUCCACUUCUUCCUGC | 1932 |
| | GACAA | | CCUG | |
| miR-4436b-5p | GUCCACUUCUGCCUGCC | 1933 | GGCAGGGCAGGCAGAAGU | 1934 |
| | CUGCC | | GGAC | |
| miR-4437 | UGGGCUCAGGGUACAAA | 1935 | AACCUUUGUACCCUGAGC | 1936 |
| | GGUU | | CCA | |
| miR-4438 | CACAGGCUUAGAAAAGA | 1937 | ACUGUCUUUUCUAAGCCU | 1938 |
| | CAGU | | GUG | |
| miR-4439 | GUGACUGAUACCUUGGA | 1939 | AUGCCUCCAAGGUAUCAG | 1940 |
| | GGCAU | | UCAC | |
| miR-4440 | UGUCGUGGGGCUUGCUG | 1941 | CAAGCCAGCAAGCCCCAC | 1942 |
| | GCUUG | | GACA | |
| miR-4441 | ACAGGGAGGAGAUUGUA | 1943 | UACAAUCUCCUCCCUGU | 1944 |
| miR-4442 | GCCGGACAAGAGGGAGG | 1945 | CCTCCCTCTTGTCCGGC | 1946 |
| miR-4443 | UUGGAGGCGUGGGUUUU | 1947 | AAAACCCACGCCUCCAA | 1948 |
| miR-4444 | CUCGAGUUGGAAGAGGC | 1949 | CGCCUCUUCCAACUCGAG | 1950 |
| | G | | | |
| miR-4445-3p | CACGGCAAAAGAAACAA | 1951 | UGGAUUGUUUCUUUUGCC | 1952 |
| | UCCA | | GUG | |
| miR-4445-5p | AGAUUGUUUCUUUUGCC | 1953 | UGCACGGCAAAAGAAACA | 1954 |
| | GUGCA | | AUCU | |
| miR-4446-3p | CAGGGCUGGCAGUGACA | 1955 | ACCCAUGUCACUGCCAGC | 1956 |
| | UGGGU | | CCUG | |
| miR-4446-5p | AUUUCCCUGCCAUUCCC | 1957 | GCCAAGGGAAUGGCAGGG | 1958 |
| | UUGGC | | AAAU | |
| miR-4447 | GGUGGGGGCUGUUGUUU | 1959 | AAACAACAGCCCCCACC | 1960 |
| miR-4448 | GGCUCCUUGGUCUAGGG | 1961 | UACCCCUAGACCAAGGAG | 1962 |
| | GUA | | CC | |
| miR-4449 | CGUCCCGGGGCUGCGCG | 1963 | UGCCUCGCGCAGCCCCGG | 1964 |
| | AGGCA | | GACG | |
| miR-4450 | UGGGGAUUUGGAGAAGU | 1965 | UCACCACUUCUCCAAAUC | 1966 |
| | GGUGA | | CCCA | |
| miR-4451 | UGGUAGAGCUGAGGACA | 1967 | UGUCCUCAGCUCUACCA | 1968 |
| miR-4452 | UUGAAUUCUUGGCCUUA | 1969 | AUCACUUAAGGCCAAGAA | 1970 |
| | AGUGAU | | UUCAA | |
| miR-4453 | GAGCUUGGUCUGUAGCG | 1971 | AACCGCUACAGACCAAGC | 1972 |
| | GUU | | UC | |
| miR-4454 | GGAUCCGAGUCACGGCA | 1973 | UGGUGCCGUGACUCGGAU | 1974 |
| | CCA | | CC | |
| miR-4455 | AGGGUGUGUGUGUUUUU | 1975 | AAAAACACACACACCCU | 1976 |
| miR-4456 | CCUGGUGGCUUCCUUUU | 1977 | AAAAGGAAGCCACCAGG | 1978 |
| miR-4457 | UCACAAGGUAUUGACUG | 1979 | UACGCCAGUCAAUACCUU | 1980 |
| | GCGUA | | GUGA | |
| miR-4458 | AGAGGUAGGUGUGGAAG | 1981 | UUCUUCCACACCUACCUC | 1982 |
| | AA | | U | |
| miR-4459 | CCAGGAGGCGGAGGAGG | 1983 | CUCCACCUCCUCCGCCUC | 1984 |
| | UGGAG | | CUGG | |
| miR-4460 | AUAGUGGUUGUGAAUUU | 1985 | AAGGUAAAUUCACAACCA | 1986 |
| | ACCUU | | CUAU | |
| miR-4461 | GAUUGAGACUAGUAGGG | 1987 | GCCUAGCCCUACUAGUCU | 1988 |
| | CUAGGC | | CAAUC | |
| miR-4462 | UGACACGGAGGGUGGCU | 1989 | UUCCCAAGCCACCCUCCG | 1990 |
| | UGGGAA | | UGUCA | |
| miR-4463 | GAGACUGGGGUGGGGCC | 1991 | GGCCCCACCCCAGUCUC | 1992 |
| miR-4464 | AAGGUUUGGAUAGAUGC | 1993 | UAUUGCAUCUAUCCAAAC | 1994 |
| | AAUA | | CUU | |
| miR-4465 | CUCAAGUAGUCUGACCA | 1995 | UCCCCUGGUCAGACUACU | 1996 |
| | GGGGA | | UGAG | |
| miR-4466 | GGGUGCGGGCCGGCGGG | 1997 | CCCCGCCGGCCCGCACCC | 1998 |
| | G | | | |
| miR-4467 | UGGCGGCGGUAGUUAUG | 1999 | AAGCCCAUAACUACCGCC | 2000 |
| | GGCUU | | GCCA | |
| miR-4468 | AGAGCAGAAGGAUGAGA | 2001 | AUCUCAUCCUUCUGCUCU | 2002 |
| | U | | | |
| miR-4469 | GCUCCCUCUAGGGUCGC | 2003 | UCCGAGCGACCCUAGAGG | 2004 |
| | UCGGA | | GAGC | |
| miR-4470 | UGGCAAACGUGGAAGCC | 2005 | UCUCGGCUUCCACGUUUG | 2006 |
| | GAGA | | CCA | |
| miR-4471 | UGGGAACUUAGUAGAGG | 2007 | UUAAACCUCUACUAAGUU | 2008 |
| | UUUAA | | CCCA | |
| miR-4472 | GGUGGGGGGUGUUGUUU | 2009 | AAAACAACACCCCCCACC | 2010 |
| | U | | | |
| miR-4473 | CUAGUGCUCUCCGUUAC | 2011 | UACUUGUAACGGAGAGCA | 2012 |
| | AAGUA | | CUAG | |
| miR-4474-3p | UUGUGGCUGGUCAUGAG | 2013 | UUAGCCUCAUGACCAGCC | 2014 |
| | GCUAA | | ACAA | |
| miR-4474-5p | UUAGUCUCAUGAUCAGA | 2015 | UGUGUCUGAUCAUGAGAC | 2016 |
| | CACA | | UAA | |
| miR-4475 | CAAGGGACCAAGCAUUC | 2017 | AUAAUGAAUGCUUGGUCC | 2018 |
| | AUUAU | | CUUG | |
| miR-4476 | CAGGAAGGAUUUAGGGA | 2019 | GCCUGUCCCUAAAUCCUU | 2020 |
| | CAGGC | | CCUG | |
| miR-4477a | CUAUUAAGGACAUUUGU | 2021 | GAAUCACAAAUGUCCUUA | 2022 |
| | GAUUC | | AUAG | |
| miR-4477b | AUUAAGGACAUUUGUGA | 2023 | AUCAAUCACAAAUGUCCU | 2024 |
| | UUGAU | | UAAU | |
| miR-4478 | GAGGCUGAGCUGAGGAG | 2025 | CUCCUCAGCUCAGCCUC | 2026 |
| miR-4479 | CGCGCGGCCGUGCUCGG | 2027 | CUGCUCCGAGCACGGCCG | 2028 |
| | AGCAG | | CGCG | |
| miR-448 | UUGCAUAUGUAGGAUGU | 2029 | AUGGGACAUCCUACAUAU | 2030 |
| | CCCAU | | GCAA | |
| miR-4480 | AGCCAAGUGGAAGUUAC | 2031 | UAAAGUAACUUCCACUUG | 2032 |
| | UUUA | | GCU | |
| miR-4481 | GGAGUGGGCUGGUGGUU | 2033 | AACCACCAGCCCACUCC | 2034 |
| miR-4482-3p | UUUCUAUUUCUCAGUGG | 2035 | GAGCCCCACUGAGAAAUA | 2036 |
| | GGCUC | | GAAA | |
| miR-4482-5p | AACCCAGUGGGCUAUGG | 2037 | CAUUUCCAUAGCCCACUG | 2038 |
| | AAAUG | | GGUU | |
| miR-4483 | GGGGUGGUCUGUUGUUG | 2039 | CAACAACAGACCACCCC | 2040 |
| miR-4484 | AAAAGGCGGGAGAAGCC | 2041 | TGGGGCTTCTCCCGCCTTT | 2042 |
| | CCA | | T | |
| miR-4485 | UAACGGCCGCGGUACCC | 2043 | UUAGGGUACCGCGGCCGU | 2044 |
| | UAA | | UA | |
| miR-4486 | GCUGGGCGAGGCUGGCA | 2045 | UGCCAGCCUCGCCCAGC | 2046 |
| miR-4487 | AGAGCUGGCUGAAGGGC | 2047 | CUGCCCUUCAGCCAGCUC | 2048 |
| | AG | | U | |
| miR-4488 | AGGGGGCGGGCUCCGGC | 2049 | CGCCGGAGCCCGCCCCCU | 2050 |
| | G | | | |
| miR-4489 | UGGGGCUAGUGAUGCAG | 2051 | CGUCCUGCAUCACUAGCC | 2052 |
| | GACG | | CCA | |
| miR-4490 | UCUGGUAAGAGAUUUGG | 2053 | UAUGCCCAAAUCUCUUAC | 2054 |
| | GCAUA | | CAGA | |
| miR-4491 | AAUGUGGACUGGUGUGA | 2055 | UUUGGUCACACCAGUCCA | 2056 |
| | CCAAA | | CAUU | |
| miR-4492 | GGGGCUGGGCGCGCGCC | 2057 | GGCGCGCGCCCAGCCCC | 2058 |
| miR-4493 | AGAAGGCCUUUCCAUCU | 2059 | ACAGAGAUGGAAAGGCCU | 2060 |
| | CUGU | | UCU | |
| miR-4494 | CCAGACUGUGGCUGACC | 2061 | CCUCUGGUCAGCCACAGU | 2062 |
| | AGAGG | | CUGG | |
| miR-4495 | AAUGUAAACAGGCUUUU | 2063 | AGCAAAAAGCCUGUUUAC | 2064 |
| | UGCU | | AUU | |
| miR-4496 | GAGGAAACUGAAGCUGA | 2065 | CCCUCUCAGCUUCAGUUU | 2066 |
| | GAGGG | | CCUC | |
| miR-4497 | CUCCGGGACGGCUGGGC | 2067 | GCCCAGCCGUCCCGGAG | 2068 |
| miR-4498 | UGGGCUGGCAGGGCAAG | 2069 | CAGCACUUGCCCUGCCAG | 2070 |
| | UGCUG | | CCCA | |
| miR-4499 | AAGACUGAGAGGAGGGA | 2071 | UCCCUCCUCUCAGUCUU | 2072 |
| miR-449a | UGGCAGUGUAUUGUUAG | 2073 | ACCAGCUAACAAUACACU | 2074 |
| | CUGGU | | GCCA | |
| miR-449b-3p | CAGCCACAACUACCCUG | 2075 | AGUGGCAGGGUAGUUGU | 2076 |
| | CCACU | | GGCUG | |
| miR-449b-5p | AGGCAGUGUAUUGUUAG | 2077 | GCCAGCUAACAAUACACU | 2078 |
| | CUGGC | | GCCU | |
| miR-449c-3p | UUGCUAGUUGCACUCCU | 2079 | ACAGAGAGGAGUGCAACU | 2080 |
| | CUCUGU | | AGCAA | |
| miR-449c-5p | UAGGCAGUGUAUUGCUA | 2081 | ACAGCCGCUAGCAAUACA | 2082 |
| | GCGGCUGU | | CUGCCUA | |
| miR-4500 | UGAGGUAGUAGUUUCUU | 2083 | AAGAAACUACUACCUCA | 2084 |
| miR-4501 | UAUGUGACCUCGGAUGA | 2085 | UGAUUCAUCCGAGGUCAC | 2086 |
| | AUCA | | AUA | |
| miR-4502 | GCUGAUGAUGAUGGUGC | 2087 | CUUCAGCACCAUCAUCAU | 2088 |
| | UGAAG | | CAGC | |
| miR-4503 | UUUAAGCAGGAAAUAGA | 2089 | UAAAUUCUAUUUCCUGCU | 2090 |
| | AUUUA | | UAAA | |
| miR-4504 | UGUGACAAUAGAGAUGA | 2091 | CAUGUUCAUCUCUAUUGU | 2092 |
| | ACAUG | | CACA | |
| miR-4505 | AGGCUGGGCUGGGACGG | 2093 | UCCGUCCCAGCCCAGCCU | 2094 |
| | A | | | |
| miR-4506 | AAAUGGGUGGUCUGAGG | 2095 | UUGCCUCAGACCACCCAU | 2096 |
| | CAA | | UU | |
| miR-4507 | CUGGGUUGGGCUGGGCU | 2097 | CCCAGCCCAGCCCAACCC | 2098 |
| | GGG | | AG | |
| miR-4508 | GCGGGGCUGGGCGCGCG | 2099 | CGCGCGCCCAGCCCCGC | 2100 |
| miR-4509 | ACUAAAGGAUAUAGAAG | 2101 | AAAACCUUCUAUAUCCUU | 2102 |
| | GUUUU | | UAGU | |
| miR-450a-3p | AUUGGGGACAUUUUGCA | 2103 | AUGAAUGCAAAAUGUCCC | 2104 |
| | UUCAU | | CAAU | |
| miR-450a-5p | UUUUGCGAUGUGUUCCU | 2105 | AUAUUAGGAACACAUCGC | 2106 |
| | AAUAU | | AAAA | |
| miR-450b-3p | UUGGGAUCAUUUUGCAU | 2107 | UAUGGAUGCAAAAUGAU | 2108 |
| | CCAUA | | CCCAA | |
| miR-450b-5p | UUUUGCAAUAUGUUCCU | 2109 | UAUUCAGGAACAUAUUGC | 2110 |
| | GAAUA | | AAAA | |
| miR-4510 | UGAGGGAGUAGGAUGUA | 2111 | AACCAUACAUCCUACUCC | 2112 |
| | UGGUU | | CUCA | |
| miR-4511 | GAAGAACUGUUGCAUUU | 2113 | AGGGCAAAUGCAACAGUU | 2114 |
| | GCCCU | | CUUC | |
| miR-4512 | CAGGGCCUCACUGUAUC | 2115 | UGGGCGAUACAGUGAGGC | 2116 |
| | GCCCA | | CCUG | |
| miR-4513 | AGACUGACGGCUGGAGG | 2117 | AUGGGCCUCCAGCCGUCA | 2118 |
| | CCCAU | | GUCU | |
| miR-4514 | ACAGGCAGGAUUGGGGA | 2119 | UUCCCCAAUCCUGCCUGU | 2120 |
| | A | | | |
| miR-4515 | AGGACUGGACUCCCGGC | 2121 | GGGCUGCCGGGAGUCCAG | 2122 |
| | AGCCC | | UCCU | |
| miR-4516 | GGGAGAAGGGUCGGGGC | 2123 | GCCCCGACCCUUCUCCC | 2124 |
| miR-4517 | AAAUAUGAUGAAACUCA | 2125 | CUCAGCUGUGAGUUUCAU | 2126 |
| | CAGCUGAG | | CAUAUUU | |
| miR-4518 | GCUCAGGGAUGAUAACU | 2127 | UCUCAGCACAGUUAUCAU | 2128 |
| | GUGCUGAGA | | CCCUGAGC | |
| miR-4519 | CAGCAGUGCGCAGGGCU | 2129 | CAGCCCUGCGCACUGCUG | 2130 |
| | G | | | |
| miR-451a | AAACCGUUACCAUUACU | 2131 | AACUCAGUAAUGGUAACG | 2132 |
| | GAGUU | | GUUU | |
| miR-451b | UAGCAAGAGAACCAUUA | 2133 | AAUGGUAAUGGUUCUCU | 2134 |
| | CCAUU | | UGCUA | |
| miR-452-3p | CUCAUCUGCAAAGAAGU | 2135 | CACUUACUUCUUUGCAGA | 2136 |
| | AAGUG | | UGAG | |
| miR-452-5p | AACUGUUUGCAGAGGAA | 2137 | UCAGUUUCCUCUGCAAAC | 2138 |
| | ACUGA | | AGUU | |
| miR-4520a-3p | UUGGACAGAAAACACGC | 2139 | UUCCUGCGUGUUUUCUGU | 2140 |
| | AGGAA | | CCAA | |
| miR-4520a-5p | CCUGCGUGUUUUCUGUC | 2141 | UUGGACAGAAAACACGCA | 2142 |
| | CAA | | GG | |
| miR-4520b-3p | UUUGGACAGAAAACACG | 2143 | ACCUGCGUGUUUUCUGUC | 2144 |
| | CAGGU | | CAAA | |
| miR-4520b-5p | CCUGCGUGUUUUCUGUC | 2145 | UUGGACAGAAAACACGCA | 2146 |
| | CAA | | GG | |
| miR-4521 | GCUAAGGAAGUCCUGUG | 2147 | CUGAGCACAGGACUUCCU | 2148 |
| | CUCAG | | UAGC | |
| miR-4522 | UGACUCUGCCUGUAGGC | 2149 | ACCGGCCUACAGGCAGAG | 2150 |
| | CGGU | | UCA | |
| miR-4523 | GACCGAGAGGGCCUCGG | 2151 | ACAGCCGAGGCCCUCUCG | 2152 |
| | CUGU | | GUC | |
| miR-4524a-3p | UGAGACAGGCUUAUGCU | 2153 | AUAGCAGCAUAAGCCUGU | 2154 |
| | GCUAU | | CUCA | |
| miR-4524a-5p | AUAGCAGCAUGAACCUG | 2155 | UGAGACAGGUUCAUGCUG | 2156 |
| | UCUCA | | CUAU | |
| miR-4524b-3p | GAGACAGGUUCAUGCUG | 2157 | UAGCAGCAUGAACCUGUC | 2158 |
| | CUA | | UC | |
| miR-4524b-5p | AUAGCAGCAUAAGCCUG | 2159 | GAGACAGGCUUAUGCUGC | 2160 |
| | UCUC | | UAU | |
| miR-4525 | GGGGGGAUGUGCAUGCU | 2161 | AACCAGCAUGCACAUCCC | 2162 |
| | GGUU | | CCC | |
| miR-4526 | GCUGACAGCAGGGCUGG | 2163 | AGCGGCCAGCCCUGCUGU | 2164 |
| | CCGCU | | CAGC | |
| miR-4527 | UGGUCUGCAAAGAGAUG | 2165 | ACAGUCAUCUCUUUGCAG | 2166 |
| | ACUGU | | ACCA | |
| miR-4528 | UCAUUAUAUGUAUGAUC | 2167 | GUCCAGAUCAUACAUAUA | 2168 |
| | UGGAC | | AUGA | |
| miR-4529-3p | AUUGGACUGCUGAUGGC | 2169 | ACGGGCCAUCAGCAGUCC | 2170 |
| | CCGU | | AAU | |
| miR-4529-5p | AGGCCAUCAGCAGUCCA | 2171 | UUCAUUGGACUGCUGAUG | 2172 |
| | AUGAA | | GCCU | |
| miR-4530 | CCCAGCAGGACGGGAGC | 2173 | CGCTCCCGTCCTGCTGGG | 2174 |
| | G | | | |
| miR-4531 | AUGGAGAAGGCUUCUGA | 2175 | UCAGAAGCCUUCUCCAU | 2176 |
| miR-4532 | CCCCGGGGAGCCCGGCG | 2177 | CGCCGGGCTCCCCGGGG | 2178 |
| miR-4533 | UGGAAGGAGGUUGCCGG | 2179 | AGCGUCCGGCAACCUCCU | 2180 |
| | ACGCU | | UCCA | |
| miR-4534 | GGAUGGAGGAGGGGUCU | 2181 | AGACCCCUCCUCCAUCC | 2182 |
| miR-4535 | GUGGACCUGGCUGGGAC | 2183 | GUCCCAGCCAGGUCCAC | 2184 |
| miR-4536-3p | UCGUGCAUAUAUCUACC | 2185 | AUGUGGUAGAUAUAUGC | 2186 |
| | ACAU | | ACGA | |
| miR-4536-5p | UGUGGUAGAUAUAUGCA | 2187 | AUCGUGCAUAUAUCUACC | 2188 |
| | CGAU | | ACA | |
| miR-4537 | UGAGCCGAGCUGAGCUU | 2189 | CAGCUAAGCUCAGCUCGG | 2190 |
| | AGCUG | | CUCA | |
| miR-4538 | GAGCUUGGAUGAGCUGG | 2191 | UCAGCCCAGCUCAUCCAA | 2192 |
| | GCUGA | | GCUC | |
| miR-4539 | GCUGAACUGGGCUGAGC | 2193 | GCCCAGCUCAGCCCAGUU | 2194 |
| | UGGGC | | CAGC | |
| miR-454-3p | UAGUGCAAUAUUGCUUA | 2195 | ACCCUAUAAGCAAUAUUG | 2196 |
| | UAGGGU | | CACUA | |
| miR-454-5p | ACCCUAUCAAUAUUGUC | 2197 | GCAGAGACAAUAUUGAU | 2198 |
| | UCUGC | | AGGGU | |
| miR-4540 | UUAGUCCUGCCUGUAGG | 2199 | UAAACCUACAGGCAGGAC | 2200 |
| | UUUA | | UAA | |
| miR-455-3p | GCAGUCCAUGGGCAUAU | 2201 | GUGUAUAUGCCCAUGGAC | 2202 |
| | ACAC | | UGC | |
| miR-455-5p | UAUGUGCCUUUGGACUA | 2203 | CGAUGUAGUCCAAAGGCA | 2204 |
| | CAUCG | | CAUA | |
| miR-4632 | UGCCGCCCUCUCGCUGC | 2205 | CUAGAGCAGCGAGAGGGC | 2206 |
| | UCUAG | | GGCA | |
| miR-4633-3p | AGGAGCUAGCCAGGCAU | 2207 | UGCAUAUGCCUGGCUAGC | 2208 |
| | AUGCA | | UCCU | |
| miR-4633-5p | AUAUGCCUGGCUAGCUC | 2209 | GAGGAGCUAGCCAGGCAU | 2210 |
| | CUC | | AU | |
| miR-4634 | CGGCGCGACCGGCCCGG | 2211 | CCCCGGGCCGGTCGCGCC | 2212 |
| | GG | | G | |
| miR-4635 | UCUUGAAGUCAGAACCC | 2213 | UUGCGGGUUCUGACUUCA | 2214 |
| | GCAA | | AGA | |
| miR-4636 | AACUCGUGUUCAAAGCC | 2215 | CUAAAGGCUUUGAACACG | 2216 |
| | UUUAG | | AGUU | |
| miR-4637 | UACUAACUGCAGAUUCA | 2217 | UCACUUGAAUCUGCAGUU | 2218 |
| | AGUGA | | AGUA | |
| miR-4638-3p | CCUGGACACCGCUCAGC | 2219 | CGGCCGGCUGAGCGGUGU | 2220 |
| | CGGCCG | | CCAGG | |
| miR-4638-5p | ACUCGGCUGCGGUGGAC | 2221 | ACUUGUCCACCGCAGCCG | 2222 |
| | AAGU | | AGU | |
| miR-4639-3p | UCACUCUCACCUUGCUU | 2223 | GCAAAGCAAGGUGAGAG | 2224 |
| | UGC | | UGA | |
| miR-4639-5p | UUGCUAAGUAGGCUGAG | 2225 | UCAAUCUCAGCCUACUUA | 2226 |
| | AUUGA | | GCAA | |
| miR-4640-3p | CACCCCCUGUUUCCUGG | 2227 | GUGGGCCAGGAAACAGGG | 2228 |
| | CCCAC | | GGUG | |
| miR-4640-5p | UGGGCCAGGGAGCAGCU | 2229 | CCCACCAGCUGCUCCCUG | 2230 |
| | GGUGGG | | GCCCA | |
| miR-4641 | UGCCCAUGCCAUACUUU | 2231 | UGAGGCAAAAGUAUGGC | 2232 |
| | UGCCUCA | | AUGGGCA | |
| miR-4642 | AUGGCAUCGUCCCCUGG | 2233 | AGCCACCAGGGGACGAUG | 2234 |
| | UGGCU | | CCAU | |
| miR-4643 | GACACAUGACCAUAAAU | 2235 | UUAGCAUUUAUGGUCAU | 2236 |
| | GCUAA | | GUGUC | |
| miR-4644 | UGGAGAGAGAAAAGAGA | 2237 | CUUCUGUCUCUUUUCUCU | 2238 |
| | CAGAAG | | CUCCA | |
| miR-4645-3p | AGACAGUAGUUCUUGCC | 2239 | AACCAGGCAAGAACUACU | 2240 |
| | UGGUU | | GUCU | |
| miR-4645-5p | ACCAGGCAAGAAAUAUU | 2241 | ACAAUAUUUCUUGCCUGG | 2242 |
| | GU | | U | |
| miR-4646-3p | AUUGUCCCUCUCCCUUC | 2243 | CUGGGAAGGGAGAGGGA | 2244 |
| | CCAG | | CAAU | |
| miR-4646-5p | ACUGGGAAGAGGAGCUG | 2245 | UCCCUCAGCUCCUCUUCC | 2246 |
| | AGGGA | | CAGU | |
| miR-4647 | GAAGAUGGUGCUGUGCU | 2247 | UUCCUCAGCACAGCACCA | 2248 |
| | GAGGAA | | UCUUC | |
| miR-4648 | UGUGGGACUGCAAAUGG | 2249 | CUCCCAUUUGCAGUCCCA | 2250 |
| | GAG | | CA | |
| miR-4649-3p | UCUGAGGCCUGCCUCUC | 2251 | UGGGGAGAGGCAGGCCUC | 2252 |
| | CCCA | | AGA | |
| miR-4649-5p | UGGGCGAGGGGUGGGCU | 2253 | CUCUGAGAGCCCACCCCU | 2254 |
| | CUCAGAG | | CGCCCA | |
| miR-4650-3p | AGGUAGAAUGAGGCCUG | 2255 | AUGUCAGGCCUCAUUCUA | 2256 |
| | ACAU | | CCU | |
| miR-4650-5p | UCAGGCCUCUUUCUACC | 2257 | AAGGUAGAAAGAGGCCU | 2258 |
| | UU | | GA | |
| miR-4651 | CGGGGUGGGUGAGGUCG | 2259 | GCCCGACCUCACCCACCC | 2260 |
| | GGC | | CG | |
| miR-4652-3p | GUUCUGUUAACCCAUCC | 2261 | UGAGGGGAUGGGUUAAC | 2262 |
| | CCUCA | | AGAAC | |
| miR-4652-5p | AGGGGACUGGUUAAUAG | 2263 | UAGUUCUAUUAACCAGUC | 2264 |
| | AACUA | | CCCU | |
| miR-4653-3p | UGGAGUUAAGGGUUGCU | 2265 | UCUCCAAGCAACCCUUAA | 2266 |
| | UGGAGA | | CUCCA | |
| miR-4653-5p | UCUCUGAGCAAGGCUUA | 2267 | GGUGUUAAGCCUUGCUCA | 2268 |
| | ACACC | | GAGA | |
| miR-4654 | UGUGGGAUCUGGAGGCA | 2269 | CCAGAUGCCUCCAGAUCC | 2270 |
| | UCUGG | | CACA | |
| miR-4655-3p | ACCCUCGUCAGGUCCCC | 2271 | CCCCGGGGACCUGACGAG | 2272 |
| | GGGG | | GGU | |
| miR-4655-5p | CACCGGGGAUGGCAGAG | 2273 | CGACCCUCUGCCAUCCCC | 2274 |
| | GGUCG | | GGUG | |
| miR-4656 | UGGGCUGAGGGCAGGAG | 2275 | ACAGGCCUCCUGCCCUCA | 2276 |
| | GCCUGU | | GCCCA | |
| miR-4657 | AAUGUGGAAGUGGUCUG | 2277 | AUGCCUCAGACCACUUCC | 2278 |
| | AGGCAU | | ACAUU | |
| miR-4658 | GUGAGUGUGGAUCCUGG | 2279 | AUUCCUCCAGGAUCCACA | 2280 |
| | AGGAAU | | CUCAC | |
| miR-4659a-3p | UUUCUUCUUAGACAUGG | 2281 | CGUUGCCAUGUCUAAGAA | 2282 |
| | CAACG | | GAAA | |
| miR-4659a-5p | CUGCCAUGUCUAAGAAG | 2283 | GUUUUCUUCUUAGACAUG | 2284 |
| | AAAAC | | GCAG | |
| miR-4659b-3p | UUUCUUCUUAGACAUGG | 2285 | AGCUGCCAUGUCUAAGAA | 2286 |
| | CAGCU | | GAAA | |
| miR-4659b-5p | UUGCCAUGUCUAAGAAG | 2287 | UUCUUCUUAGACAUGGCA | 2288 |
| | AA | | A | |
| miR-466 | AUACACAUACACGCAAC | 2289 | AUGUGUGUUGCGUGUAU | 2290 |
| | ACACAU | | GUGUAU | |
| miR-4660 | UGCAGCUCUGGUGGAAA | 2291 | CUCCAUUUUCCACCAGAG | 2292 |
| | AUGGAG | | CUGCA | |
| miR-4661-3p | CAGGAUCCACAGAGCUA | 2293 | UGGACUAGCUCUGUGGAU | 2294 |
| | GUCCA | | CCUG | |
| miR-4661-5p | AACUAGCUCUGUGGAUC | 2295 | GUCAGGAUCCACAGAGCU | 2296 |
| | CUGAC | | AGUU | |
| miR-4662a-3p | AAAGAUAGACAAUUGGC | 2297 | AUUUAGCCAAUUGUCUAU | 2298 |
| | UAAAU | | CUUU | |
| miR-4662a-5p | UUAGCCAAUUGUCCAUC | 2299 | CUAAAGAUGGACAAUUG | 2300 |
| | UUUAG | | GCUAA | |
| miR-4662b | AAAGAUGGACAAUUGGC | 2301 | AUUUAGCCAAUUGUCCAU | 2302 |
| | UAAAU | | CUUU | |
| miR-4663 | AGCUGAGCUCCAUGGAC | 2303 | ACUGCACGUCCAUGGAGC | 2304 |
| | GUGCAGU | | UCAGCU | |
| miR-4664-3p | CUUCCGGUCUGUGAGCC | 2305 | GACGGGGCUCACAGACCG | 2306 |
| | CCGUC | | GAAG | |
| miR-4664-5p | UGGGGUGCCCACUCCGC | 2307 | AACUUGCGGAGUGGGCAC | 2308 |
| | AAGUU | | CCCA | |
| miR-4665-3p | CUCGGCCGCGGCGCGUA | 2309 | GGCGGGGGCUACGCGCCG | 2310 |
| | GCCCCCGCC | | CGGCCGAG | |
| miR-4665-5p | CUGGGGGACGCGUGAGC | 2311 | GCUCGCGCUCACGCGUCC | 2312 |
| | GCGAGC | | CCCAG | |
| miR-4666a-3p | CAUACAAUCUGACAUGU | 2313 | AAAUACAUGUCAGAUUG | 2314 |
| | AUUU | | UAUG | |
| miR-4666a-5p | AUACAUGUCAGAUUGUA | 2315 | GGCAUACAAUCUGACAUG | 2316 |
| | UGCC | | UAU | |
| miR-4666b | UUGCAUGUCAGAUUGUA | 2317 | GGGAAUUACAAUCUGACA | 2318 |
| | AUUCCC | | UGCAA | |
| miR-4667-3p | UCCCUCCUUCUGUCCCC | 2319 | CUGUGGGGACAGAAGGA | 2320 |
| | ACAG | | GGGA | |
| miR-4667-5p | ACUGGGGAGCAGAAGGA | 2321 | GGUUCUCCUUCUGCUCCC | 2322 |
| | GAACC | | CAGU | |
| miR-4668-3p | GAAAAUCCUUUUUGUUU | 2323 | CUGGAAAAACAAAAAGG | 2324 |
| | UUCCAG | | AUUUUC | |
| miR-4668-5p | AGGGAAAAAAAAAAGGA | 2325 | GACAAAUCCUUUUUUUUU | 2326 |
| | UUUGUC | | UCCCU | |
| miR-4669 | UGUGUCCGGGAAGUGGA | 2327 | CCUCCUCCACUUCCCGGA | 2328 |
| | GGAGG | | CACA | |
| miR-4670-3p | UGAAGUUACAUCAUGGU | 2329 | AAGCGACCAUGAUGUAAC | 2330 |
| | CGCUU | | UUCA | |
| miR-4670-5p | AAGCGACCAUGAUGUAA | 2331 | UGAAGUUACAUCAUGGUC | 2332 |
| | CUUCA | | GCUU | |
| miR-4671-3p | UUAGUGCAUAGUCUUUG | 2333 | AGACCAAAGACUAUGCAC | 2334 |
| | GUCU | | UAA | |
| miR-4671-5p | ACCGAAGACUGUGCGCU | 2335 | AGAUUAGCGCACAGUCUU | 2336 |
| | AAUCU | | CGGU | |
| miR-4672 | UUACACAGCUGGACAGA | 2337 | UGCCUCUGUCCAGCUGUG | 2338 |
| | GGCA | | UAA | |
| miR-4673 | UCCAGGCAGGAGCCGGA | 2339 | UCCAGUCCGGCUCCUGCC | 2340 |
| | CUGGA | | UGGA | |
| miR-4674 | CUGGGCUCGGGACGCGC | 2341 | AGCCGCGCGUCCCGAGCC | 2342 |
| | GGCU | | CAG | |
| miR-4675 | GGGGCUGUGAUUGACCA | 2343 | CCUGCUGGUCAAUCACAG | 2344 |
| | GCAGG | | CCCC | |
| miR-4676-3p | CACUGUUUCACCACUGG | 2345 | AAGAGCCAGUGGUGAAAC | 2346 |
| | CUCUU | | AGUG | |
| miR-4676-5p | GAGCCAGUGGUGAGACA | 2347 | UCACUGUCUCACCACUGG | 2348 |
| | GUGA | | CUC | |
| miR-4677-3p | UCUGUGAGACCAAAGAA | 2349 | AGUAGUUCUUUGGUCUCA | 2350 |
| | CUACU | | CAGA | |
| miR-4677-5p | UUGUUCUUUGGUCUUUC | 2351 | UGGCUGAAAGACCAAAGA | 2352 |
| | AGCCA | | ACAA | |
| miR-4678 | AAGGUAUUGUUCAGACU | 2353 | UCAUAAGUCUGAACAAUA | 2354 |
| | UAUGA | | CCUU | |
| miR-4679 | UCUGUGAUAGAGAUUCU | 2355 | AGCAAAGAAUCUCUAUCA | 2356 |
| | UUGCU | | CAGA | |
| miR-4680-3p | UCUGAAUUGUAAGAGUU | 2357 | UAACAACUCUUACAAUUC | 2358 |
| | GUUA | | AGA | |
| miR-4680-5p | AGAACUCUUGCAGUCUU | 2359 | ACAUCUAAGACUGCAAGA | 2360 |
| | AGAUGU | | GUUCU | |
| miR-4681 | AACGGGAAUGCAGGCUG | 2361 | AGAUACAGCCUGCAUUCC | 2362 |
| | UAUCU | | CGUU | |
| miR-4682 | UCUGAGUUCCUGGAGCC | 2363 | AGACCAGGCUCCAGGAAC | 2364 |
| | UGGUCU | | UCAGA | |
| miR-4683 | UGGAGAUCCAGUGCUCG | 2365 | AUCGGGCGAGCACUGGAU | 2366 |
| | CCCGAU | | CUCCA | |
| miR-4684-3p | UGUUGCAAGUCGGUGGA | 2367 | ACGUCUCCACCGACUUGC | 2368 |
| | GACGU | | AACA | |
| miR-4684-5p | CUCUCUACUGACUUGCA | 2369 | UAUGUUGCAAGUCAGUA | 2370 |
| | ACAUA | | GAGAG | |
| miR-4685-3p | UCUCCCUUCCUGCCCUG | 2371 | CUAGCCAGGGCAGGAAGG | 2372 |
| | GCUAG | | GAGA | |
| miR-4685-5p | CCCAGGGCUUGGAGUGG | 2373 | AACCUUGCCCCACUCCAA | 2374 |
| | GGCAAGGUU | | GCCCUGGG | |
| miR-4686 | UAUCUGCUGGGCUUUCU | 2375 | AACACCAGAAAGCCCAGC | 2376 |
| | GGUGUU | | AGAUA | |
| miR-4687-3p | UGGCUGUUGGAGGGGGC | 2377 | GCCUGCCCCCUCCAACAG | 2378 |
| | AGGC | | CCA | |
| miR-4687-5p | CAGCCCUCCUCCCGCACC | 2379 | UUUGGGUGCGGGAGGAG | 2380 |
| | CAAA | | GGCUG | |
| miR-4688 | UAGGGGCAGCAGAGGAC | 2381 | CCCAGGUCCUCUGCUGCC | 2382 |
| | CUGGG | | CCUA | |
| miR-4689 | UUGAGGAGACAUGGUGG | 2383 | GGCCCCCACCAUGUCUCC | 2384 |
| | GGGCC | | UCAA | |
| miR-4690-3p | GCAGCCCAGCUGAGGCC | 2385 | CAGAGGCCUCAGCUGGGC | 2386 |
| | UCUG | | UGC | |
| miR-4690-5p | GAGCAGGCGAGGCUGGG | 2387 | UUCAGCCCAGCCUCGCCU | 2388 |
| | CUGAA | | GCUC | |
| miR-4691-3p | CCAGCCACGGACUGAGA | 2389 | AUGCACUCUCAGUCCGUG | 2390 |
| | GUGCAU | | GCUGG | |
| miR-4691-5p | GUCCUCCAGGCCAUGAG | 2391 | CCGCAGCUCAUGGCCUGG | 2392 |
| | CUGCGG | | AGGAC | |
| miR-4692 | UCAGGCAGUGUGGGUAU | 2393 | AUCUGAUACCCACACUGC | 2394 |
| | CAGAU | | CUGA | |
| miR-4693-3p | UGAGAGUGGAAUUCACA | 2395 | AAAUACUGUGAAUUCCAC | 2396 |
| | GUAUUU | | UCUCA | |
| miR-4693-5p | AUACUGUGAAUUUCACU | 2397 | UGUGACAGUGAAAUUCAC | 2398 |
| | GUCACA | | AGUAU | |
| miR-4694-3p | CAAAUGGACAGGAUAAC | 2399 | AGGUGUUAUCCUGUCCAU | 2400 |
| | ACCU | | UUG | |
| miR-4694-5p | AGGUGUUAUCCUAUCCA | 2401 | GCAAAUGGAUAGGAUAA | 2402 |
| | UUUGC | | CACCU | |
| miR-4695-3p | UGAUCUCACCGCUGCCU | 2403 | GAAGGAGGCAGCGGUGA | 2404 |
| | CCUUC | | GAUCA | |
| miR-4695-5p | CAGGAGGCAGUGGGCGA | 2405 | CCUGCUCGCCCACUGCCU | 2406 |
| | GCAGG | | CCUG | |
| miR-4696 | UGCAAGACGGAUACUGU | 2407 | AGAUGACAGUAUCCGUCU | 2408 |
| | CAUCU | | UGCA | |
| miR-4697-3p | UGUCAGUGACUCCUGCC | 2409 | ACCAAGGGGCAGGAGUCA | 2410 |
| | CCUUGGU | | CUGACA | |
| miR-4697-5p | AGGGGGCGCAGUCACUG | 2411 | CACGUCAGUGACUGCGCC | 2412 |
| | ACGUG | | CCCU | |
| miR-4698 | UCAAAAUGUAGAGGAAG | 2413 | UGGGGUCUUCCUCUACAU | 2414 |
| | ACCCCA | | UUUGA | |
| miR-4699-3p | AAUUUACUCUGCAAUCU | 2415 | GGAGAAGAUUGCAGAGU | 2416 |
| | UCUCC | | AAAUU | |
| miR-4699-5p | AGAAGAUUGCAGAGUAA | 2417 | GGAACUUACUCUGCAAUC | 2418 |
| | GUUCC | | UUCU | |
| miR-4700-3p | CACAGGACUGACUCCUC | 2419 | CACUGGGGUGAGGAGUCA | 2420 |
| | ACCCCAGUG | | GUCCUGUG | |
| miR-4700-5p | UCUGGGGAUGAGGACAG | 2421 | ACACACUGUCCUCAUCCC | 2422 |
| | UGUGU | | CAGA | |
| miR-4701-3p | AUGGGUGAUGGGUGUGG | 2423 | ACACCACACCCAUCACCC | 2424 |
| | UGU | | AU | |
| miR-4701-5p | UUGGCCACCACACCUAC | 2425 | AAGGGGUAGGUGUGGUG | 2426 |
| | CCCUU | | GCCAA | |
| miR-4703-3p | UGUAGUUGUAUUGUAUU | 2427 | GUGGCAAUACAAUACAAC | 2428 |
| | GCCAC | | UACA | |
| miR-4703-5p | UAGCAAUACAGUACAAA | 2429 | ACUAUAUUUGUACUGUA | 2430 |
| | UAUAGU | | UUGCUA | |
| miR-4704-3p | UCAGUCACAUAUCUAGU | 2431 | UAGACACUAGAUAUGUG | 2432 |
| | GUCUA | | ACUGA | |
| miR-4704-5p | GACACUAGGCAUGUGAG | 2433 | AAUCACUCACAUGCCUAG | 2434 |
| | UGAUU | | UGUC | |
| miR-4705 | UCAAUCACUUGGUAAUU | 2435 | ACAGCAAUUACCAAGUGA | 2436 |
| | GCUGU | | UUGA | |
| miR-4706 | AGCGGGGAGGAAGUGGG | 2437 | AAGCAGCGCCCACUUCCU | 2438 |
| | CGCUGCUU | | CCCCGCU | |
| miR-4707-3p | AGCCCGCCCCAGCCGAG | 2439 | AGAACCUCGGCUGGGGCG | 2440 |
| | GUUCU | | GGCU | |
| miR-4707-5p | GCCCCGGCGCGGGCGGG | 2441 | CCAGAACCCGCCCGCGCC | 2442 |
| | UUCUGG | | GGGGC | |
| miR-4708-3p | AGCAAGGCGGCAUCUCU | 2443 | AUCAGAGAGAUGCCGCCU | 2444 |
| | CUGAU | | UGCU | |
| miR-4708-5p | AGAGAUGCCGCCUUGCU | 2445 | AAGGAGCAAGGCGGCAUC | 2446 |
| | CCUU | | UCU | |
| miR-4709-3p | UUGAAGAGGAGGUGCUC | 2447 | GCUACAGAGCACCUCCUC | 2448 |
| | UGUAGC | | UUCAA | |
| miR-4709-5p | ACAACAGUGACUUGCUC | 2449 | UUGGAGAGCAAGUCACUG | 2450 |
| | UCCAA | | UUGU | |
| miR-4710 | GGGUGAGGGCAGGUGGU | 2451 | AACCACCUGCCCUCACCC | 2452 |
| | U | | | |
| miR-4711-3p | CGUGUCUUCUGGCUUGA | 2453 | AUCAAGCCAGAAGACACG | 2454 |
| | U | | | |
| miR-4711-5p | UGCAUCAGGCCAGAAGA | 2455 | CUCAUGUCUUCUGGCCUG | 2456 |
| | CAUGAG | | AUGCA | |
| miR-4712-3p | AAUGAGAGACCUGUACU | 2457 | AUACAGUACAGGUCUCUC | 2458 |
| | GUAU | | AUU | |
| miR-4712-5p | UCCAGUACAGGUCUCUC | 2459 | GAAAUGAGAGACCUGUAC | 2460 |
| | AUUUC | | UGGA | |
| miR-4713-3p | UGGGAUCCAGACAGUGG | 2461 | UUCUCCCACUGUCUGGAU | 2462 |
| | GAGAA | | CCCA | |
| miR-4713-5p | UUCUCCCACUACCAGGC | 2463 | UGGGAGCCUGGUAGUGG | 2464 |
| | UCCCA | | GAGAA | |
| miR-4714-3p | CCAACCUAGGUGGUCAG | 2465 | CAACUCUGACCACCUAGG | 2466 |
| | AGUUG | | UUGG | |
| miR-4714-5p | AACUCUGACCCCUUAGG | 2467 | AUCAACCUAAGGGGUCAG | 2468 |
| | UUGAU | | AGUU | |
| miR-4715-3p | GUGCCACCUUAACUGCA | 2469 | AUUGGCUGCAGUUAAGG | 2470 |
| | GCCAAU | | UGGCAC | |
| miR-4715-5p | AAGUUGGCUGCAGUUAA | 2471 | CCACCUUAACUGCAGCCA | 2472 |
| | GGUGG | | ACUU | |
| miR-4716-3p | AAGGGGGAAGGAAACAU | 2473 | UCUCCAUGUUUCCUUCCC | 2474 |
| | GGAGA | | CCUU | |
| miR-4716-5p | UCCAUGUUUCCUUCCCC | 2475 | AGAAGGGGGAAGGAAAC | 2476 |
| | CUUCU | | AUGGA | |
| miR-4717-3p | ACACAUGGGUGGCUGUG | 2477 | AGGCCACAGCCACCCAUG | 2478 |
| | GCCU | | UGU | |
| miR-4717-5p | UAGGCCACAGCCACCCA | 2479 | ACACAUGGGUGGCUGUGG | 2480 |
| | UGUGU | | CCUA | |
| miR-4718 | AGCUGUACCUGAAACCA | 2481 | UGCUUGGUUUCAGGUACA | 2482 |
| | AGCA | | GCU | |
| miR-4719 | UCACAAAUCUAUAAUAU | 2483 | CCUGCAUAUUAUAGAUUU | 2484 |
| | GCAGG | | GUGA | |
| miR-4720-3p | UGCUUAAGUUGUACCAA | 2485 | AUACUUGGUACAACUUAA | 2486 |
| | GUAU | | GCA | |
| miR-4720-5p | CCUGGCAUAUUUGGUAU | 2487 | AAGUUAUACCAAAUAUGC | 2488 |
| | AACUU | | CAGG | |
| miR-4721 | UGAGGGCUCCAGGUGAC | 2489 | CCACCGUCACCUGGAGCC | 2490 |
| | GGUGG | | CUCA | |
| miR-4722-3p | ACCUGCCAGCACCUCCC | 2491 | CUGCAGGGAGGUGCUGGC | 2492 |
| | UGCAG | | AGGU | |
| miR-4722-5p | GGCAGGAGGGCUGUGCC | 2493 | CAACCUGGCACAGCCCUC | 2494 |
| | AGGUUG | | CUGCC | |
| miR-4723-3p | CCCUCUCUGGCUCCUCCC | 2495 | UUUGGGGAGGAGCCAGA | 2496 |
| | CAAA | | GAGGG | |
| miR-4723-5p | UGGGGGAGCCAUGAGAU | 2497 | UGCUCUUAUCUCAUGGCU | 2498 |
| | AAGAGCA | | CCCCCA | |
| miR-4724-3p | GUACCUUCUGGUUCAGC | 2499 | ACUAGCUGAACCAGAAGG | 2500 |
| | UAGU | | UAC | |
| miR-4724-5p | AACUGAACCAGGAGUGA | 2501 | CGAAGCUCACUCCUGGUU | 2502 |
| | GCUUCG | | CAGUU | |
| miR-4725-3p | UGGGGAAGGCGUCAGUG | 2503 | CCCGACACUGACGCCUUC | 2504 |
| | UCGGG | | CCCA | |
| miR-4725-5p | AGACCCUGCAGCCUUCC | 2505 | GGUGGGAAGGCUGCAGG | 2506 |
| | CACC | | GUCU | |
| miR-4726-3p | ACCCAGGUUCCCUCUGG | 2507 | UGCGGCCAGAGGGAACCU | 2508 |
| | CCGCA | | GGGU | |
| miR-4726-5p | AGGGCCAGAGGAGCCUG | 2509 | CCACUCCAGGCUCCUCUG | 2510 |
| | GAGUGG | | GCCCU | |
| miR-4727-3p | AUAGUGGGAAGCUGGCA | 2511 | GAAUCUGCCAGCUUCCCA | 2512 |
| | GAUUC | | CUAU | |
| miR-4727-5p | AUCUGCCAGCUUCCACA | 2513 | CCACUGUGGAAGCUGGCA | 2514 |
| | GUGG | | GAU | |
| miR-4728-3p | CAUGCUGACCUCCCUCC | 2515 | CUGGGGCAGGAGGGAGG | 2516 |
| | UGCCCCAG | | UCAGCAUG | |
| miR-4728-5p | UGGGAGGGGAGAGGCAG | 2517 | UGCUUGCUGCCUCUCCCC | 2518 |
| | CAAGCA | | UCCCA | |
| miR-4729 | UCAUUUAUCUGUUGGGA | 2519 | UAGCUUCCCAACAGAUAA | 2520 |
| | AGCUA | | AUGA | |
| miR-4730 | CUGGCGGAGCCCAUUCC | 2521 | UGGCAUGGAAUGGGCUCC | 2522 |
| | AUGCCA | | GCCAG | |
| miR-4731-3p | CACACAAGUGGCCCCCA | 2523 | AGUGUUGGGGGCCACUUG | 2524 |
| | ACACU | | UGUG | |
| miR-4731-5p | UGCUGGGGGCCACAUGA | 2525 | CACACUCAUGUGGCCCCC | 2526 |
| | GUGUG | | AGCA | |
| miR-4732-3p | GCCCUGACCUGUCCUGU | 2527 | CAGAACAGGACAGGUCAG | 2528 |
| | UCUG | | GGC | |
| miR-4732-5p | UGUAGAGCAGGGAGCAG | 2529 | AGCUUCCUGCUCCCUGCU | 2530 |
| | GAAGCU | | CUACA | |
| miR-4733-3p | CCACCAGGUCUAGCAUU | 2531 | AUCCCAAUGCUAGACCUG | 2532 |
| | GGGAU | | GUGG | |
| miR-4733-5p | AAUCCCAAUGCUAGACC | 2533 | CACCGGGUCUAGCAUUGG | 2534 |
| | CGGUG | | GAUU | |
| miR-4734 | GCUGCGGGCUGCGGUCA | 2535 | CGCCCUGACCGCAGCCCG | 2536 |
| | GGGCG | | CAGC | |
| miR-4735-3p | AAAGGUGCUCAAAUUAG | 2537 | AUGUCUAAUUUGAGCACC | 2538 |
| | ACAU | | UUU | |
| miR-4735-5p | CCUAAUUUGAACACCUU | 2539 | UACCGAAGGUGUUCAAAU | 2540 |
| | CGGUA | | UAGG | |
| miR-4736 | AGGCAGGUUAUCUGGGC | 2541 | CAGCCCAGAUAACCUGCC | 2542 |
| | UG | | U | |
| miR-4737 | AUGCGAGGAUGCUGACA | 2543 | CACUGUCAGCAUCCUCGC | 2544 |
| | GUG | | AU | |
| miR-4738-3p | UGAAACUGGAGCGCCUG | 2545 | UCCUCCAGGCGCUCCAGU | 2546 |
| | GAGGA | | UUCA | |
| miR-4738-5p | ACCAGCGCGUUUUCAGU | 2547 | AUGAAACUGAAAACGCGC | 2548 |
| | UUCAU | | UGGU | |
| miR-4739 | AAGGGAGGAGGAGCGGA | 2549 | AGGGCCCCUCCGCUCCUC | 2550 |
| | GGGGCCCU | | CUCCCUU | |
| miR-4740-3p | GCCCGAGAGGAUCCGUC | 2551 | GCAGGGACGGAUCCUCUC | 2552 |
| | CCUGC | | GGGC | |
| miR-4740-5p | AGGACUGAUCCUCUCGG | 2553 | CCUGCCCGAGAGGAUCAG | 2554 |
| | GCAGG | | UCCU | |
| miR-4741 | CGGGCUGUCCGGAGGGG | 2555 | AGCCGACCCCUCCGGACA | 2556 |
| | UCGGCU | | GCCCG | |
| miR-4742-3p | UCUGUAUUCUCCUUUGC | 2557 | CUGCAGGCAAAGGAGAAU | 2558 |
| | CUGCAG | | ACAGA | |
| miR-4742-5p | UCAGGCAAAGGGAUAUU | 2559 | UCUGUAAAUAUCCCUUUG | 2560 |
| | UACAGA | | CCUGA | |
| miR-4743 | UGGCCGGAUGGGACAGG | 2561 | AUGCCUCCUGUCCCAUCC | 2562 |
| | AGGCAU | | GGCCA | |
| miR-4744 | UCUAAAGACUAGACUUC | 2563 | CAUAGCGAAGUCUAGUCU | 2564 |
| | GCUAUG | | UUAGA | |
| miR-4745-3p | UGGCCCGGCGACGUCUC | 2565 | GACCGUGAGACGUCGCCG | 2566 |
| | ACGGUC | | GGCCA | |
| miR-4745-5p | UGAGUGGGGCUCCCGGG | 2567 | CGCCGUCCCGGGAGCCCC | 2568 |
| | ACGGCG | | ACUCA | |
| miR-4746-3p | AGCGGUGCUCCUGCGGG | 2569 | UCGGCCCGCAGGAGCACC | 2570 |
| | CCGA | | GCU | |
| miR-4746-5p | CCGGUCCCAGGAGAACC | 2571 | UCUGCAGGUUCUCCUGGG | 2572 |
| | UGCAGA | | ACCGG | |
| miR-4747-3p | AAGGCCCGGGCUUUCCU | 2573 | CUGGGAGGAAAGCCCGGG | 2574 |
| | CCCAG | | CCUU | |
| miR-4747-5p | AGGGAAGGAGGCUUGGU | 2575 | CUAAGACCAAGCCUCCUU | 2576 |
| | CUUAG | | CCCU | |
| miR-4748 | GAGGUUUGGGGAGGAUU | 2577 | AGCAAAUCCUCCCCAAAC | 2578 |
| | UGCU | | CUC | |
| miR-4749-3p | CGCCCCUCCUGCCCCCAC | 2579 | CUGUGGGGGCAGGAGGG | 2580 |
| | AG | | GCG | |
| miR-4749-5p | UGCGGGGACAGGCCAGG | 2581 | GAUGCCCUGGCCUGUCCC | 2582 |
| | GCAUC | | CGCA | |
| miR-4750 | CUCGGGCGGAGGUGGUU | 2583 | CACUCAACCACCUCCGCC | 2584 |
| | GAGUG | | CGAG | |
| miR-4751 | AGAGGACCCGUAGCUGC | 2585 | CCUUCUAGCAGCUACGGG | 2586 |
| | UAGAAGG | | UCCUCU | |
| miR-4752 | UUGUGGAUCUCAAGGAU | 2587 | AGCACAUCCUUGAGAUCC | 2588 |
| | GUGCU | | ACAA | |
| miR-4753-3p | UUCUCUUUCUUUAGCCU | 2589 | ACACAAGGCUAAAGAAAG | 2590 |
| | UGUGU | | AGAA | |
| miR-4753-5p | CAAGGCCAAAGGAAGAG | 2591 | CTGTTCTCTTCCTTTGGCC | 2592 |
| | AACAG | | TTG | |
| miR-4754 | AUGCGGACCUGGGUUAG | 2593 | ACUCCGCUAACCCAGGUC | 2594 |
| | CGGAGU | | CGCAU | |
| miR-4755-3p | AGCCAGGCUCUGAAGGG | 2595 | ACUUUCCCUUCAGAGCCU | 2596 |
| | AAAGU | | GGCU | |
| miR-4755-5p | UUUCCCUUCAGAGCCUG | 2597 | AAAGCCAGGCUCUGAAGG | 2598 |
| | GCUUU | | GAAA | |
| miR-4756-3p | CCAGAGAUGGUUGCCUU | 2599 | AUAGGAAGGCAACCAUCU | 2600 |
| | CCUAU | | CUGG | |
| miR-4756-5p | CAGGGAGGCGCUCACUC | 2601 | AGCAGAGAGUGAGCGCCU | 2602 |
| | UCUGCU | | CCCUG | |
| miR-4757-3p | CAUGACGUCACAGAGGC | 2603 | GCGAAGCCUCUGUGACGU | 2604 |
| | UUCGC | | CAUG | |
| miR-4757-5p | AGGCCUCUGUGACGUCA | 2605 | ACACCGUGACGUCACAGA | 2606 |
| | CGGUGU | | GGCCU | |
| miR-4758-3p | UGCCCCACCUGCUGACC | 2607 | GAGGGUGGUCAGCAGGU | 2608 |
| | ACCCUC | | GGGGCA | |
| miR-4758-5p | GUGAGUGGGAGCCGGUG | 2609 | CAGCCCCACCGGCUCCCA | 2610 |
| | GGGCUG | | CUCAC | |
| miR-4759 | UAGGACUAGAUGUUGGA | 2611 | UAAUUCCAACAUCUAGUC | 2612 |
| | AUUA | | CUA | |
| miR-4760-3p | AAAUUCAUGUUCAAUCU | 2613 | GGUUUAGAUUGAACAUG | 2614 |
| | AAACC | | AAUUU | |
| miR-4760-5p | UUUAGAUUGAACAUGAA | 2615 | CUAACUUCAUGUUCAAUC | 2616 |
| | GUUAG | | UAAA | |
| miR-4761-3p | GAGGGCAUGCGCACUUU | 2617 | GGACAAAGUGCGCAUGCC | 2618 |
| | GUCC | | CUC | |
| miR-4761-5p | ACAAGGUGUGCAUGCCU | 2619 | GGUCAGGCAUGCACACCU | 2620 |
| | GACC | | UGU | |
| miR-4762-3p | CUUCUGAUCAAGAUUUG | 2621 | CACCACAAAUCUUGAUCA | 2622 |
| | UGGUG | | GAAG | |
| miR-4762-5p | CCAAAUCUUGAUCAGAA | 2623 | AGGCUUCUGAUCAAGAUU | 2624 |
| | GCCU | | UGG | |
| miR-4763-3p | AGGCAGGGGCUGGUGCU | 2625 | CCCGCCCAGCACCAGCCC | 2626 |
| | GGGCGGG | | CUGCCU | |
| miR-4763-5p | CGCCUGCCCAGCCCUCCU | 2627 | AGCAGGAGGGCUGGGCAG | 2628 |
| | GCU | | GCG | |
| miR-4764-3p | UUAACUCCUUUCACACC | 2629 | CCAUGGGUGUGAAAGGA | 2630 |
| | CAUGG | | GUUAA | |
| miR-4764-5p | UGGAUGUGGAAGGAGUU | 2631 | AGAUAACUCCUUCCACAU | 2632 |
| | AUCU | | CCA | |
| miR-4765 | UGAGUGAUUGAUAGCUA | 2633 | GAACAUAGCUAUCAAUCA | 2634 |
| | UGUUC | | CUCA | |
| miR-4766-3p | AUAGCAAUUGCUCUUUU | 2635 | UUCCAAAAGAGCAAUUGC | 2636 |
| | GGAA | | UAU | |
| miR-4766-5p | UCUGAAAGAGCAGUUGG | 2637 | AACACCAACUGCUCUUUC | 2638 |
| | UGUU | | AGA | |
| miR-4767 | CGCGGGCGCUCCUGGCC | 2639 | GGCGGCGGCCAGGAGCGC | 2640 |
| | GCCGCC | | CCGCG | |
| miR-4768-3p | CCAGGAGAUCCAGAGAG | 2641 | AUUCUCUCUGGAUCUCCU | 2642 |
| | AAU | | GG | |
| miR-4768-5p | AUUCUCUCUGGAUCCCA | 2643 | AUCCAUGGGAUCCAGAGA | 2644 |
| | UGGAU | | GAAU | |
| miR-4769-3p | UCUGCCAUCCUCCCUCCC | 2645 | GUAGGGGAGGGAGGAUG | 2646 |
| | CUAC | | GCAGA | |
| miR-4769-5p | GGUGGGAUGGAGAGAAG | 2647 | CUCAUACCUUCUCUCCAU | 2648 |
| | GUAUGAG | | CCCACC | |
| miR-4770 | UGAGAUGACACUGUAGC | 2649 | AGCUACAGUGUCAUCUCA | 2650 |
| | U | | | |
| miR-4771 | AGCAGACUUGACCUACA | 2651 | UAAUUGUAGGUCAAGUC | 2652 |
| | AUUA | | UGCU | |
| miR-4772-3p | CCUGCAACUUUGCCUGA | 2653 | UCUGAUCAGGCAAAGUUG | 2654 |
| | UCAGA | | CAGG | |
| miR-4772-5p | UGAUCAGGCAAAAUUGC | 2655 | AGUCUGCAAUUUUGCCUG | 2656 |
| | AGACU | | AUCA | |
| miR-4773 | CAGAACAGGAGCAUAGA | 2657 | GCCUUUCUAUGCUCCUGU | 2658 |
| | AAGGC | | UCUG | |
| miR-4774-3p | AUUGCCUAACAUGUGCC | 2659 | UUCUGGCACAUGUUAGGC | 2660 |
| | AGAA | | AAU | |
| miR-4774-5p | UCUGGUAUGUAGUAGGU | 2661 | UUAUUACCUACUACAUAC | 2662 |
| | AAUAA | | CAGA | |
| miR-4775 | UUAAUUUUUUGUUUCGG | 2663 | AGUGACCGAAACAAAAAA | 2664 |
| | UCACU | | UUAA | |
| miR-4776-3p | CUUGCCAUCCUGGUCCA | 2665 | AUGCAGUGGACCAGGAUG | 2666 |
| | CUGCAU | | GCAAG | |
| miR-4776-5p | GUGGACCAGGAUGGCAA | 2667 | AGCCCUUGCCAUCCUGGU | 2668 |
| | GGGCU | | CCAC | |
| miR-4777-3p | AUACCUCAUCUAGAAUG | 2669 | UACAGCAUUCUAGAUGAG | 2670 |
| | CUGUA | | GUAU | |
| miR-4777-5p | UUCUAGAUGAGAGAUAU | 2671 | UAUAUAUAUCUCUCAUCU | 2672 |
| | AUAUA | | AGAA | |
| miR-4778-3p | UCUUCUUCCUUUGCAGA | 2673 | UCAACUCUGCAAAGGAAG | 2674 |
| | GUUGA | | AAGA | |
| miR-4778-5p | AAUUCUGUAAAGGAAGA | 2675 | CCUCUUCUUCCUUUACAG | 2676 |
| | AGAGG | | AAUU | |
| miR-4779 | UAGGAGGGAAUAGUAAA | 2677 | CUGCUUUUACUAUUCCCU | 2678 |
| | AGCAG | | CCUA | |
| miR-4780 | ACCCUUGAGCCUGAUCC | 2679 | GCUAGGGAUCAGGCUCAA | 2680 |
| | CUAGC | | GGGU | |
| miR-4781-3p | AAUGUUGGAAUCCUCGC | 2681 | CUCUAGCGAGGAUUCCAA | 2682 |
| | UAGAG | | CAUU | |
| miR-4781-5p | UAGCGGGGAUUCCAAUA | 2683 | CCAAUAUUGGAAUCCCCG | 2684 |
| | UUGG | | CUA | |
| miR-4782-3p | UGAUUGUCUUCAUAUCU | 2685 | GUUCUAGAUAUGAAGAC | 2686 |
| | AGAAC | | AAUCA | |
| miR-4782-5p | UUCUGGAUAUGAAGACA | 2687 | UUGAUUGUCUUCAUAUCC | 2688 |
| | AUCAA | | AGAA | |
| miR-4783-3p | CCCCGGUGUUGGGGCGC | 2689 | GCAGACGCGCCCCAACAC | 2690 |
| | GUCUGC | | CGGGG | |
| miR-4783-5p | GGCGCGCCCAGCUCCCG | 2691 | AGCCCGGGAGCUGGGCGC | 2692 |
| | GGCU | | GCC | |
| miR-4784 | UGAGGAGAUGCUGGGAC | 2693 | UCAGUCCCAGCAUCUCCU | 2694 |
| | UGA | | CA | |
| miR-4785 | AGAGUCGGCGACGCCGC | 2695 | GCUGGCGGCGUCGCCGAC | 2696 |
| | CAGC | | UCU | |
| miR-4786-3p | UGAAGCCAGCUCUGGUC | 2697 | GCCCAGACCAGAGCUGGC | 2698 |
| | UGGGC | | UUCA | |
| miR-4786-5p | UGAGACCAGGACUGGAU | 2699 | GGUGCAUCCAGUCCUGGU | 2700 |
| | GCACC | | CUCA | |
| miR-4787-3p | GAUGCGCCGCCCACUGC | 2701 | GCGCGGGGCAGUGGGCGG | 2702 |
| | CCCGCGC | | CGCAUC | |
| miR-4787-5p | GCGGGGGUGGCGGCGGC | 2703 | GGGAUGCCGCCGCCACCC | 2704 |
| | AUCCC | | CCGC | |
| miR-4788 | UUACGGACCAGCUAAGG | 2705 | GCCUCCCUUAGCUGGUCC | 2706 |
| | GAGGC | | GUAA | |
| miR-4789-3p | CACACAUAGCAGGUGUA | 2707 | UAUAUACACCUGCUAUGU | 2708 |
| | UAUA | | GUG | |
| miR-4789-5p | GUAUACACCUGAUAUGU | 2709 | CAUACACAUAUCAGGUGU | 2710 |
| | GUAUG | | AUAC | |
| miR-4790-3p | UGAAUGGUAAAGCGAUG | 2711 | UGUGACAUCGCUUUACCA | 2712 |
| | UCACA | | UUCA | |
| miR-4790-5p | AUCGCUUUACCAUUCAU | 2713 | AACAUGAAUGGUAAAGC | 2714 |
| | GUU | | GAU | |
| miR-4791 | UGGAUAUGAUGACUGAA | 2715 | UUUCAGUCAUCAUAUCCA | 2716 |
| | A | | | |
| miR-4792 | CGGUGAGCGCUCGCUGG | 2717 | GCCAGCGAGCGCUCACCG | 2718 |
| | C | | | |
| miR-4793-3p | UCUGCACUGUGAGUUGG | 2719 | AGCCAGCCAACUCACAGU | 2720 |
| | CUGGCU | | GCAGA | |
| miR-4793-5p | ACAUCCUGCUCCACAGG | 2721 | CCUCUGCCCUGUGGAGCA | 2722 |
| | GCAGAGG | | GGAUGU | |
| miR-4794 | UCUGGCUAUCUCACGAG | 2723 | ACAGUCUCGUGAGAUAGC | 2724 |
| | ACUGU | | CAGA | |
| miR-4795-3p | AUAUUAUUAGCCACUUC | 2725 | AUCCAGAAGUGGCUAAUA | 2726 |
| | UGGAU | | AUAU | |
| miR-4795-5p | AGAAGUGGCUAAUAAUA | 2727 | UCAAUAUUAUUAGCCACU | 2728 |
| | UUGA | | UCU | |
| miR-4796-3p | UAAAGUGGCAGAGUAUA | 2729 | GUGUCUAUACUCUGCCAC | 2730 |
| | GACAC | | UUUA | |
| miR-4796-5p | UGUCUAUACUCUGUCAC | 2731 | GUAAAGUGACAGAGUAU | 2732 |
| | UUUAC | | AGACA | |
| miR-4797-3p | UCUCAGUAAGUGGCACU | 2733 | ACAGAGUGCCACUUACUG | 2734 |
| | CUGU | | AGA | |
| miR-4797-5p | GACAGAGUGCCACUUAC | 2735 | UUCAGUAAGUGGCACUCU | 2736 |
| | UGAA | | GUC | |
| miR-4798-3p | AACUCACGAAGUAUACC | 2737 | ACUUCGGUAUACUUCGUG | 2738 |
| | GAAGU | | AGUU | |
| miR-4798-5p | UUCGGUAUACUUUGUGA | 2739 | CCAAUUCACAAAGUAUAC | 2740 |
| | AUUGG | | CGAA | |
| miR-4799-3p | ACUGGCAUGCUGCAUUU | 2741 | UAUAUAAAUGCAGCAUGC | 2742 |
| | AUAUA | | CAGU | |
| miR-4799-5p | AUCUAAAUGCAGCAUGC | 2743 | GACUGGCAUGCUGCAUUU | 2744 |
| | CAGUC | | AGAU | |
| miR-4800-3p | CAUCCGUCCGUCUGUCC | 2745 | GUGGACAGACGGACGGAU | 2746 |
| | AC | | G | |
| miR-4800-5p | AGUGGACCGAGGAAGGA | 2747 | UCCUUCCUUCCUCGGUCC | 2748 |
| | AGGA | | ACU | |
| miR-4801 | UACACAAGAAAACCAAG | 2749 | UGAGCCUUGGUUUUCUUG | 2750 |
| | GCUCA | | UGUA | |
| miR-4802-3p | UACAUGGAUGGAAACCU | 2751 | GCUUGAAGGUUUCCAUCC | 2752 |
| | UCAAGC | | AUGUA | |
| miR-4802-5p | UAUGGAGGUUCUAGACC | 2753 | AACAUGGUCUAGAACCUC | 2754 |
| | AUGUU | | CAUA | |
| miR-4803 | UAACAUAAUAGUGUGGA | 2755 | UCAAUCCACACUAUUAUG | 2756 |
| | UUGA | | UUA | |
| miR-4804-3p | UGCUUAACCUUGCCCUC | 2757 | UUUCGAGGGCAAGGUUA | 2758 |
| | GAAA | | AGCA | |
| miR-4804-5p | UUGGACGGUAAGGUUAA | 2759 | UUGCUUAACCUUACCGUC | 2760 |
| | GCAA | | CAA | |
| miR-483-3p | UCACUCCUCUCCUCCCG | 2761 | AAGACGGGAGGAGAGGA | 2762 |
| | UCUU | | GUGA | |
| miR-483-5p | AAGACGGGAGGAAAGAA | 2763 | CTCCCTTCTTTCCTCCCGT | 2764 |
| | GGGAG | | CTT | |
| miR-484 | UCAGGCUCAGUCCCCUC | 2765 | AUCGGGAGGGGACUGAGC | 2766 |
| | CCGAU | | CUGA | |
| miR-485-3p | GUCAUACACGGCUCUCC | 2767 | AGAGAGGAGAGCCGUGU | 2768 |
| | UCUCU | | AUGAC | |
| miR-485-5p | AGAGGCUGGCCGUGAUG | 2769 | GAAUUCAUCACGGCCAGC | 2770 |
| | AAUUC | | CUCU | |
| miR-486-3p | CGGGGCAGCUCAGUACA | 2771 | AUCCUGUACUGAGCUGCC | 2772 |
| | GGAU | | CCG | |
| miR-486-5p | UCCUGUACUGAGCUGCC | 2773 | CUCGGGGCAGCUCAGUAC | 2774 |
| | CCGAG | | AGGA | |
| miR-487a | AAUCAUACAGGGACAUC | 2775 | AACUGGAUGUCCCUGUAU | 2776 |
| | CAGUU | | GAUU | |
| miR-487b | AAUCGUACAGGGUCAUC | 2777 | AAGUGGAUGACCCUGUAC | 2778 |
| | CACUU | | GAUU | |
| miR-488-3p | UUGAAAGGCUAUUUCUU | 2779 | GACCAAGAAAUAGCCUUU | 2780 |
| | GGUC | | CAA | |
| miR-488-5p | CCCAGAUAAUGGCACUC | 2781 | UUGAGAGUGCCAUUAUCU | 2782 |
| | UCAA | | GGG | |
| miR-489 | GUGACAUCACAUAUACG | 2783 | GCUGCCGUAUAUGUGAUG | 2784 |
| | GCAGC | | UCAC | |
| miR-490-3p | CAACCUGGAGGACUCCA | 2785 | CAGCAUGGAGUCCUCCAG | 2786 |
| | UGCUG | | GUUG | |
| miR-490-5p | CCAUGGAUCUCCAGGUG | 2787 | ACCCACCUGGAGAUCCAU | 2788 |
| | GGU | | GG | |
| miR-491-3p | CUUAUGCAAGAUUCCCU | 2789 | GUAGAAGGGAAUCUUGC | 2790 |
| | UCUAC | | AUAAG | |
| miR-491-5p | AGUGGGGAACCCUUCCA | 2791 | CCUCAUGGAAGGGUUCCC | 2792 |
| | UGAGG | | CACU | |
| miR-492 | AGGACCUGCGGGACAAG | 2793 | AAGAAUCUUGUCCCGCAG | 2794 |
| | AUUCUU | | GUCCU | |
| miR-493-3p | UGAAGGUCUACUGUGUG | 2795 | CCUGGCACACAGUAGACC | 2796 |
| | CCAGG | | UUCA | |
| miR-493-5p | UUGUACAUGGUAGGCUU | 2797 | AAUGAAAGCCUACCAUGU | 2798 |
| | UCAUU | | ACAA | |
| miR-494 | UGAAACAUACACGGGAA | 2799 | GAGGUUUCCCGUGUAUGU | 2800 |
| | ACCUC | | UUCA | |
| miR-495 | AAACAAACAUGGUGCAC | 2801 | AAGAAGUGCACCAUGUUU | 2802 |
| | UUCUU | | GUUU | |
| miR-496 | UGAGUAUUACAUGGCCA | 2803 | GAGAUUGGCCAUGUAAU | 2804 |
| | AUCUC | | ACUCA | |
| miR-497-3p | CAAACCACACUGUGGUG | 2805 | UCUAACACCACAGUGUGG | 2806 |
| | UUAGA | | UUUG | |
| miR-497-5p | CAGCAGCACACUGUGGU | 2807 | ACAAACCACAGUGUGCUG | 2808 |
| | UUGU | | CUG | |
| miR-498 | UUUCAAGCCAGGGGGCG | 2809 | GAAAAACGCCCCCUGGCU | 2810 |
| | UUUUUC | | UGAAA | |
| miR-4999-3p | UCACUACCUGACAAUAC | 2811 | ACUGUAUUGUCAGGUAG | 2812 |
| | AGU | | UGA | |
| miR-4999-5p | UGCUGUAUUGUCAGGUA | 2813 | UCACUACCUGACAAUACA | 2814 |
| | GUGA | | GCA | |
| miR-499a-3p | AACAUCACAGCAAGUCU | 2815 | AGCACAGACUUGCUGUGA | 2816 |
| | GUGCU | | UGUU | |
| miR-499a-5p | UUAAGACUUGCAGUGAU | 2817 | AAACAUCACUGCAAGUCU | 2818 |
| | GUUU | | UAA | |
| miR-499b-3p | AACAUCACUGCAAGUCU | 2819 | UGUUAAGACUUGCAGUG | 2820 |
| | UAACA | | AUGUU | |
| miR-499b-5p | ACAGACUUGCUGUGAUG | 2821 | UGAACAUCACAGCAAGUC | 2822 |
| | UUCA | | UGU | |
| miR-5000-3p | UCAGGACACUUCUGAAC | 2823 | UCCAAGUUCAGAAGUGUC | 2824 |
| | UUGGA | | CUGA | |
| miR-5000-5p | CAGUUCAGAAGUGUUCC | 2825 | ACUCAGGAACACUUCUGA | 2826 |
| | UGAGU | | ACUG | |
| miR-5001-3p | UUCUGCCUCUGUCCAGG | 2827 | AAGGACCUGGACAGAGGC | 2828 |
| | UCCUU | | AGAA | |
| miR-5001-5p | AGGGCUGGACUCAGCGG | 2829 | AGCUCCGCCGCUGAGUCC | 2830 |
| | CGGAGCU | | AGCCCU | |
| miR-5002-3p | UGACUGCCUCACUGACC | 2831 | AAGUGGUCAGUGAGGCA | 2832 |
| | ACUU | | GUCA | |
| miR-5002-5p | AAUUUGGUUUCUGAGGC | 2833 | ACUAAGUGCCUCAGAAAC | 2834 |
| | ACUUAGU | | CAAAUU | |
| miR-5003-3p | UACUUUUCUAGGUUGUU | 2835 | CCCCAACAACCUAGAAAA | 2836 |
| | GGGG | | GUA | |
| miR-5003-5p | UCACAACAACCUUGCAG | 2837 | UCUACCCUGCAAGGUUGU | 2838 |
| | GGUAGA | | UGUGA | |
| miR-5004-3p | CUUGGAUUUUCCUGGGC | 2839 | CUGAGGCCCAGGAAAAUC | 2840 |
| | CUCAG | | CAAG | |
| miR-5004-5p | UGAGGACAGGGCAAAUU | 2841 | UCGUGAAUUUGCCCUGUC | 2842 |
| | CACGA | | CUCA | |
| miR-5006-3p | UUUCCCUUUCCAUCCUG | 2843 | CUGCCAGGAUGGAAAGGG | 2844 |
| | GCAG | | AAA | |
| miR-5006-5p | UUGCCAGGGCAGGAGGU | 2845 | UUCCACCUCCUGCCCUGG | 2846 |
| | GGAA | | CAA | |
| miR-5007-3p | AUCAUAUGAACCAAACU | 2847 | AUUAGAGUUUGGUUCAU | 2848 |
| | CUAAU | | AUGAU | |
| miR-5007-5p | UAGAGUCUGGCUGAUAU | 2849 | AAACCAUAUCAGCCAGAC | 2850 |
| | GGUUU | | UCUA | |
| miR-5008-3p | CCUGUGCUCCCAGGGCC | 2851 | GCGAGGCCCUGGGAGCAC | 2852 |
| | UCGC | | AGG | |
| miR-5008-5p | UGAGGCCCUUGGGGCAC | 2853 | CCACUGUGCCCCAAGGGC | 2854 |
| | AGUGG | | CUCA | |
| miR-5009-3p | UCCUAAAUCUGAAAGUC | 2855 | UUUUGGACUUUCAGAUU | 2856 |
| | CAAAA | | UAGGA | |
| miR-5009-5p | UUGGACUUUUUCAGAUU | 2857 | AUCCCCAAAUCUGAAAAA | 2858 |
| | UGGGGAU | | GUCCAA | |
| miR-500a-3p | AUGCACCUGGGCAAGGA | 2859 | CAGAAUCCUUGCCCAGGU | 2860 |
| | UUCUG | | GCAU | |
| miR-500a-5p | UAAUCCUUGCUACCUGG | 2861 | UCUCACCCAGGUAGCAAG | 2862 |
| | GUGAGA | | GAUUA | |
| miR-500b | AAUCCUUGCUACCUGGG | 2863 | ACCCAGGUAGCAAGGAUU | 2864 |
| | U | | | |
| miR-501-3p | AAUGCACCCGGGCAAGG | 2865 | AGAAUCCUUGCCCGGGUG | 2866 |
| | AUUCU | | CAUU | |
| miR-501-5p | AAUCCUUUGUCCCUGGG | 2867 | UCUCACCCAGGGACAAAG | 2868 |
| | UGAGA | | GAUU | |
| miR-5010-3p | UUUUGUGUCUCCCAUUC | 2869 | CUGGGGAAUGGGAGACAC | 2870 |
| | CCCAG | | AAAA | |
| miR-5010-5p | AGGGGGAUGGCAGAGCA | 2871 | AAUUUUGCUCUGCCAUCC | 2872 |
| | AAAUU | | CCCU | |
| miR-5011-3p | GUGCAUGGCUGUAUAUA | 2873 | UGUUAUAUAUACAGCCAU | 2874 |
| | UAACA | | GCAC | |
| miR-5011-5p | UAUAUAUACAGCCAUGC | 2875 | GAGUGCAUGGCUGUAUA | 2876 |
| | ACUC | | UAUA | |
| miR-502-3p | AAUGCACCUGGGCAAGG | 2877 | UGAAUCCUUGCCCAGGUG | 2878 |
| | AUUCA | | CAUU | |
| miR-502-5p | AUCCUUGCUAUCUGGGU | 2879 | UAGCACCCAGAUAGCAAG | 2880 |
| | GCUA | | GAU | |
| miR-503 | UAGCAGCGGGAACAGUU | 2881 | CUGCAGAACUGUUCCCGC | 2882 |
| | CUGCAG | | UGCUA | |
| miR-504 | AGACCCUGGUCUGCACU | 2883 | GAUAGAGUGCAGACCAGG | 2884 |
| | CUAUC | | GUCU | |
| miR-5047 | UUGCAGCUGCGGUUGUA | 2885 | ACCUUACAACCGCAGCUG | 2886 |
| | AGGU | | CAA | |
| miR-505-3p | CGUCAACACUUGCUGGU | 2887 | AGGAAACCAGCAAGUGUU | 2888 |
| | UUCCU | | GACG | |
| miR-505-5p | GGGAGCCAGGAAGUAUU | 2889 | ACAUCAAUACUUCCUGGC | 2890 |
| | GAUGU | | UCCC | |
| miR-506-3p | UAAGGCACCCUUCUGAG | 2891 | UCUACUCAGAAGGGUGCC | 2892 |
| | UAGA | | UUA | |
| miR-506-5p | UAUUCAGGAAGGUGUUA | 2893 | UUAAGUAACACCUUCCUG | 2894 |
| | CUUAA | | AAUA | |
| miR-507 | UUUUGCACCUUUUGGAG | 2895 | UUCACUCCAAAAGGUGCA | 2896 |
| | UGAA | | AAA | |
| miR-508-3p | UGAUUGUAGCCUUUUGG | 2897 | UCUACUCCAAAAGGCUAC | 2898 |
| | AGUAGA | | AAUCA | |
| miR-508-5p | UACUCCAGAGGGCGUCA | 2899 | CAUGAGUGACGCCCUCUG | 2900 |
| | CUCAUG | | GAGUA | |
| miR-5087 | GGGUUUGUAGCUUUGCU | 2901 | CAUGCCAGCAAAGCUACA | 2902 |
| | GGCAUG | | AACCC | |
| miR-5088 | CAGGGCUCAGGGAUUGG | 2903 | CUCCAUCCAAUCCCUGAG | 2904 |
| | AUGGAG | | CCCUG | |
| miR-5089 | GUGGGAUUUCUGAGUAG | 2905 | GAUGCUACUCAGAAAUCC | 2906 |
| | CAUC | | CAC | |
| miR-509-3-5p | UACUGCAGACGUGGCAA | 2907 | CAUGAUUGCCACGUCUGC | 2908 |
| | UCAUG | | AGUA | |
| miR-509-3p | UGAUUGGUACGUCUGUG | 2909 | CUACCCACAGACGUACCA | 2910 |
| | GGUAG | | AUCA | |
| miR-509-5p | UACUGCAGACAGUGGCA | 2911 | UGAUUGCCACUGUCUGCA | 2912 |
| | AUCA | | GUA | |
| miR-5090 | CCGGGGCAGAUUGGUGU | 2913 | CACCCUACACCAAUCUGC | 2914 |
| | AGGGUG | | CCCGG | |
| miR-5091 | ACGGAGACGACAAGACU | 2915 | CAGCACAGUCUUGUCGUC | 2916 |
| | GUGCUG | | UCCGU | |
| miR-5092 | AAUCCACGCUGAGCUUG | 2917 | GAUGCCAAGCUCAGCGUG | 2918 |
| | GCAUC | | GAUU | |
| miR-5093 | AGGAAAUGAGGCUGGCU | 2919 | GCUCCUAGCCAGCCUCAU | 2920 |
| | AGGAGC | | UUCCU | |
| miR-5094 | AAUCAGUGAAUGCCUUG | 2921 | AGGUUCAAGGCAUUCACU | 2922 |
| | AACCU | | GAUU | |
| miR-5095 | UUACAGGCGUGAACCAC | 2923 | CGCGGUGGUUCACGCCUG | 2924 |
| | CGCG | | UAA | |
| miR-5096 | GUUUCACCAUGUUGGUC | 2925 | GCCUGACCAACAUGGUGA | 2926 |
| | AGGC | | AAC | |
| miR-510 | UACUCAGGAGAGUGGCA | 2927 | GUGAUUGCCACUCUCCUG | 2928 |
| | AUCAC | | AGUA | |
| miR-5100 | UUCAGAUCCCAGCGGUG | 2929 | AGAGGCACCGCUGGGAUC | 2930 |
| | CCUCU | | UGAA | |
| miR-511 | GUGUCUUUUGCUCUGCA | 2931 | UGACUGCAGAGCAAAAGA | 2932 |
| | GUCA | | CAC | |
| miR-512-3p | AAGUGCUGUCAUAGCUG | 2933 | GACCUCAGCUAUGACAGC | 2934 |
| | AGGUC | | ACUU | |
| miR-512-5p | CACUCAGCCUUGAGGGC | 2935 | GAAAGUGCCCUCAAGGCU | 2936 |
| | ACUUUC | | GAGUG | |
| miR-513a-3p | UAAAUUUCACCUUUCUG | 2937 | CCUUCUCAGAAAGGUGAA | 2938 |
| | AGAAGG | | AUUUA | |
| miR-513a-5p | UUCACAGGGAGGUGUCA | 2939 | AUGACACCUCCCUGUGAA | 2940 |
| | U | | | |
| miR-513b | UUCACAAGGAGGUGUCA | 2941 | AUAAAUGACACCUCCUUG | 2942 |
| | UUUAU | | UGAA | |
| miR-513c-3p | UAAAUUUCACCUUUCUG | 2943 | UCUUCUCAGAAAGGUGAA | 2944 |
| | AGAAGA | | AUUUA | |
| miR-513c-5p | UUCUCAAGGAGGUGUCG | 2945 | AUAAACGACACCUCCUUG | 2946 |
| | UUUAU | | AGAA | |
| miR-514a-3p | AUUGACACUUCUGUGAG | 2947 | UCUACUCACAGAAGUGUC | 2948 |
| | UAGA | | AAU | |
| miR-514a-5p | UACUCUGGAGAGUGACA | 2949 | CAUGAUUGUCACUCUCCA | 2950 |
| | AUCAUG | | GAGUA | |
| miR-514b-3p | AUUGACACCUCUGUGAG | 2951 | UCCACUCACAGAGGUGUC | 2952 |
| | UGGA | | AAU | |
| miR-514b-5p | UUCUCAAGAGGGAGGCA | 2953 | AUGAUUGCCUCCCUCUUG | 2954 |
| | AUCAU | | AGAA | |
| miR-515-3p | GAGUGCCUUCUUUUGGA | 2955 | AACGCUCCAAAAGAAGGC | 2956 |
| | GCGUU | | ACUC | |
| miR-515-5p | UUCUCCAAAAGAAAGCA | 2957 | CAGAAAGUGCUUUCUUUU | 2958 |
| | CUUUCUG | | GGAGAA | |
| miR-516a-3p | UGCUUCCUUUCAGAGGG | 2959 | ACCCUCUGAAAGGAAGCA | 2960 |
| | U | | | |
| miR-516a-5p | UUCUCGAGGAAAGAAGC | 2961 | GAAAGUGCUUCUUUCCUC | 2962 |
| | ACUUUC | | GAGAA | |
| miR-516b-3p | UGCUUCCUUUCAGAGGG | 2963 | ACCCUCUGAAAGGAAGCA | 2964 |
| | U | | | |
| miR-516b-5p | AUCUGGAGGUAAGAAGC | 2965 | AAAGUGCUUCUUACCUCC | 2966 |
| | ACUUU | | AGAU | |
| miR-517-5p | CCUCUAGAUGGAAGCAC | 2967 | AGACAGUGCUUCCAUCUA | 2968 |
| | UGUCU | | GAGG | |
| miR-517a-3p | AUCGUGCAUCCCUUUAG | 2969 | ACACUCUAAAGGGAUGCA | 2970 |
| | AGUGU | | CGAU | |
| miR-517b-3p | AUCGUGCAUCCCUUUAG | 2971 | ACACUCUAAAGGGAUGCA | 2972 |
| | AGUGU | | CGAU | |
| miR-517c-3p | AUCGUGCAUCCUUUUAG | 2973 | ACACUCUAAAAGGAUGCA | 2974 |
| | AGUGU | | CGAU | |
| miR-5186 | AGAGAUUGGUAGAAAUC | 2975 | ACCUGAUUUCUACCAAUC | 2976 |
| | AGGU | | UCU | |
| miR-5187-3p | ACUGAAUCCUCUUUUCC | 2977 | CUGAGGAAAAGAGGAUU | 2978 |
| | UCAG | | CAGU | |
| miR-5187-5p | UGGGAUGAGGGAUUGAA | 2979 | UCCACUUCAAUCCCUCAU | 2980 |
| | GUGGA | | CCCA | |
| miR-5188 | AAUCGGACCCAUUUAAA | 2981 | CUCCGGUUUAAAUGGGUC | 2982 |
| | CCGGAG | | CGAUU | |
| miR-5189 | UCUGGGCACAGGCGGAU | 2983 | CCUGUCCAUCCGCCUGUG | 2984 |
| | GGACAGG | | CCCAGA | |
| miR-518a-3p | GAAAGCGCUUCCCUUUG | 2985 | UCCAGCAAAGGGAAGCGC | 2986 |
| | CUGGA | | UUUC | |
| miR-518a-5p | CUGCAAAGGGAAGCCCU | 2987 | GAAAGGGCUUCCCUUUGC | 2988 |
| | UUC | | AG | |
| miR-518b | CAAAGCGCUCCCCUUUA | 2989 | ACCUCUAAAGGGGAGCGC | 2990 |
| | GAGGU | | UUUG | |
| miR-518c-3p | CAAAGCGCUUCUCUUUA | 2991 | ACACUCUAAAGAGAAGCG | 2992 |
| | GAGUGU | | CUUUG | |
| miR-518c-5p | UCUCUGGAGGGAAGCAC | 2993 | CAGAAAGUGCUUCCCUCC | 2994 |
| | UUUCUG | | AGAGA | |
| miR-518d-3p | CAAAGCGCUUCCCUUUG | 2995 | GCUCCAAAGGGAAGCGCU | 2996 |
| | GAGC | | UUG | |
| miR-518d-5p | CUCUAGAGGGAAGCACU | 2997 | CAGAAAGUGCUUCCCUCU | 2998 |
| | UUCUG | | AGAG | |
| miR-518e-3p | AAAGCGCUUCCCUUCAG | 2999 | CACUCUGAAGGGAAGCGC | 3000 |
| | AGUG | | UUU | |
| miR-518e-5p | CUCUAGAGGGAAGCGCU | 3001 | CAGAAAGCGCUUCCCUCU | 3002 |
| | UUCUG | | AGAG | |
| miR-518f-3p | GAAAGCGCUUCUCUUUA | 3003 | CCUCUAAAGAGAAGCGCU | 3004 |
| | GAGG | | UUC | |
| miR-518f-5p | CUCUAGAGGGAAGCACU | 3005 | GAGAAAGUGCUUCCCUCU | 3006 |
| | UUCUC | | AGAG | |
| miR-5190 | CCAGUGACUGAGCUGGA | 3007 | UGGCUCCAGCUCAGUCAC | 3008 |
| | GCCA | | UGG | |
| miR-5191 | AGGAUAGGAAGAAUGAA | 3009 | AGCACUUCAUUCUUCCUA | 3010 |
| | GUGCU | | UCCU | |
| miR-5192 | AGGAGAGUGGAUUCCAG | 3011 | ACCACCUGGAAUCCACUC | 3012 |
| | GUGGU | | UCCU | |
| miR-5193 | UCCUCCUCUACCUCAUC | 3013 | ACUGGGAUGAGGUAGAG | 3014 |
| | CCAGU | | GAGGA | |
| miR-5194 | UGAGGGGUUUGGAAUGG | 3015 | CCAUCCCAUUCCAAACCC | 3016 |
| | GAUGG | | CUCA | |
| miR-5195-3p | AUCCAGUUCUCUGAGGG | 3017 | AGCCCCCUCAGAGAACUG | 3018 |
| | GGCU | | GAU | |
| miR-5195-5p | AACCCCUAAGGCAACUG | 3019 | CCAUCCAGUUGCCUUAGG | 3020 |
| | GAUGG | | GGUU | |
| miR-5196-3p | UCAUCCUCGUCUCCCUC | 3021 | CUGGGAGGGAGACGAGG | 3022 |
| | CCAG | | AUGA | |
| miR-5196-5p | AGGGAAGGGGACGAGGG | 3023 | CCCAACCCUCGUCCCCUU | 3024 |
| | UUGGG | | CCCU | |
| miR-5197-3p | AAGAAGAGACUGAGUCA | 3025 | AUUCGAUGACUCAGUCUC | 3026 |
| | UCGAAU | | UUCUU | |
| miR-5197-5p | CAAUGGCACAAACUCAU | 3027 | UCAAGAAUGAGUUUGUG | 3028 |
| | UCUUGA | | CCAUUG | |
| miR-519a-3p | AAAGUGCAUCCUUUUAG | 3029 | ACUACUCUAAAAGGAUGCA | 3030 |
| | AGUGU | | CUUU | |
| miR-519a-5p | CUCUAGAGGGAAGCGCU | 3031 | CAGAAAGCGCUUCCCUCU | 3032 |
| | UUCUG | | AGAG | |
| miR-519b-3p | AAAGGCAUCCUUUUAG | 3033 | AACCUCUAAAAGGAUGCA | 3034 |
| | AGGUU | | CUUU | |
| miR-519b-5p | CUCUAGAGGGAAGCGCU | 3035 | CAGAAAGCGCUUCCCUCU | 3036 |
| | UUCUG | | AGAG | |
| miR-519c-3p | AAAGUGCAUCUUUUUAG | 3037 | AUCCUCUAAAAAGAUGCA | 3038 |
| | AGGAU | | CUUU | |
| miR-519c-5p | CUCUAGAGGGAAGCGCU | 3039 | CAGAAAGCGCUUCCCUCU | 3040 |
| | UUCUG | | AGAG | |
| miR-519d | CAAAGUGCCUCCCUUUA | 3041 | CACUCUAAAGGGAGGCAC | 3042 |
| | GAGUG | | UUUG | |
| miR-519e-3p | AAGUGCCUCCUUUUAGA | 3043 | AACACUCUAAAAGGAGGC | 3044 |
| | GUGUU | | ACUU | |
| miR-519e-5p | UUCUCCAAAAGGGAGCA | 3045 | GAAAGUGCUCCCUUUUGG | 3046 |
| | CUUUC | | AGAA | |
| miR-520a-3p | AAAGUGCUUCCCUUUGG | 3047 | ACAGUCCAAAGGGAAGCA | 3048 |
| | AGUGU | | CUUU | |
| miR-520a-5p | CUCCAGAGGGAAGUACU | 3049 | AGAAAGUACUUCCCUCUG | 3050 |
| | UUCU | | GAG | |
| miR-520b | AAAGUGCUUCCUUUUAG | 3051 | CCCUCUAAAAGGAAGCAC | 3052 |
| | AGGG | | UUU | |
| miR-520c-3p | AAAGUGCUUCCUUUUAG | 3053 | ACCCUCUAAAAGGAAGCA | 3054 |
| | AGGGU | | CUUU | |
| miR-520c-5p | CUCUAGAGGGAAGCACU | 3055 | CAGAAAGUGCUUCCCUCU | 3056 |
| | UUCUG | | AGAG | |
| miR-520d-3p | AAAGUGCUUCUCUUUGG | 3057 | ACCCACCAAAGAGAAGCA | 3058 |
| | UGGGU | | CUUU | |
| miR-520d-5p | CUACAAAGGGAAGCCCU | 3059 | GAAAGGGCUUCCCUUUGU | 3060 |
| | UUC | | AG | |
| miR-520e | AAAGUGCUUCCUUUUUG | 3061 | CCCUCAAAAAGGAAGCAC | 3062 |
| | AGGG | | UUU | |
| miR-520f | AAGUGCUUCCUUUUAGA | 3063 | AACCCUCUAAAAGGAAGC | 3064 |
| | GGGUU | | ACUU | |
| miR-520g | ACAAAGUGCUUCCCUUU | 3065 | ACACUCUAAAGGGAAGCA | 3066 |
| | AGAGUGU | | CUUUGU | |
| miR-520h | ACAAAGUGCUUCCCUUU | 3067 | ACUCUAAAGGGAAGCACU | 3068 |
| | AGAGU | | UUGU | |
| miR-521 | AACGCACUUCCCUUUAG | 3069 | ACACUCUAAAGGGAAGUG | 3070 |
| | AGUGU | | CGUU | |
| miR-522-3p | AAAAUGGUUCCCUUUAG | 3071 | ACACUCUAAAGGGAACCA | 3072 |
| | AGUGU | | UUUU | |
| miR-522-5p | CUCUAGAGGGAAGCGCU | 3073 | CAGAAAGCGCUUCCCUCU | 3074 |
| | UUCUG | | AGAG | |
| miR-523-3p | GAACGCGCUUCCCUAUA | 3075 | ACCCUCUAUAGGGAAGCG | 3076 |
| | GAGGGU | | CGUUC | |
| miR-523-5p | CUCUAGAGGGAAGCGCU | 3077 | CAGAAAGCGCUUCCCUCU | 3078 |
| | UUCUG | | AGAG | |
| miR-524-3p | GAAGGCGCUUCCCUUUG | 3079 | ACUCCAAAGGGAAGCGCC | 3080 |
| | GAGU | | UUC | |
| miR-524-5p | CUACAAAGGGAAGCACU | 3081 | GAGAAAGUGCUUCCCUUU | 3082 |
| | UUCUC | | GUAG | |
| miR-525-3p | GAAGGCGCUUCCCUUUA | 3083 | CGCUCUAAAGGGAAGCGC | 3084 |
| | GAGCG | | CUUC | |
| miR-525-5p | CUCCAGAGGGAUGCACU | 3085 | AGAAAGUGCAUCCCUCUG | 3086 |
| | UUCU | | GAG | |
| miR-526a | CUCUAGAGGGAAGCACU | 3087 | CAGAAAGUGCUUCCCUCU | 3088 |
| | UUCUG | | AGAG | |
| miR-526b-3p | GAAAGUGCUUCCUUUUA | 3089 | GCCUCUAAAAGGAAGCAC | 3090 |
| | GAGGC | | UUUC | |
| miR-526b-5p | CUCUUGAGGGAAGCACU | 3091 | ACAGAAAGUGCUUCCCUC | 3092 |
| | UUCUGU | | AAGAG | |
| miR-527 | CUGCAAAGGGAAGCCCU | 3093 | GAAAGGGCUUCCCUUUGC | 3094 |
| | UUC | | AG | |
| miR-532-3p | CCUCCCACACCCAAGGC | 3095 | UGCAAGCCUUGGGUGUGG | 3096 |
| | UUGCA | | GAGG | |
| miR-532-5p | CAUGCCUUGAGUGUAGG | 3097 | ACGGUCCUACACUCAAGG | 3098 |
| | ACCGU | | CAUG | |
| miR-539-3p | AUCAUACAAGGACAAUU | 3099 | AAAGAAAUUGUCCUUGU | 3100 |
| | UCUUU | | AUGAU | |
| miR-539-5p | GGAGAAAUUAUCCUUGG | 3101 | ACACACCAAGGAUAAUUU | 3102 |
| | UGUGU | | CUCC | |
| miR-541-3p | UGGUGGGCACAGAAUCU | 3103 | AGUCCAGAUUCUGUGCCC | 3104 |
| | GGACU | | ACCA | |
| miR-541-5p | AAAGGAUUCUGCUGUCG | 3105 | AGUGGGACCGACAGCAGA | 3106 |
| | GUCCCACU | | AUCCUUU | |
| miR-542-3p | UGUGACAGAUUGAUAAC | 3107 | UUUCAGUUAUCAAUCUGU | 3108 |
| | UGAAA | | CACA | |
| miR-542-5p | UCGGGGAUCAUCAUGUC | 3109 | UCUCGUGACAUGAUGAUC | 3110 |
| | ACGAGA | | CCCGA | |
| miR-543 | AAACAUUCGCGGUGCAC | 3111 | AAGAAGUGCACCGCGAAU | 3112 |
| | UUCUU | | GUUU | |
| miR-544a | AUUCUGCAUUUUUAGCA | 3113 | GAACUUGCUAAAAAUGCA | 3114 |
| | AGUUC | | GAAU | |
| miR-544b | ACCUGAGGUUGUGCAUU | 3115 | UUAGAAAUGCACAACCUC | 3116 |
| | UCUAA | | AGGU | |
| miR-545-3p | UCAGCAAACAUUUAUUG | 3117 | GCACACAAUAAAUGUUUG | 3118 |
| | UGUGC | | CUGA | |
| miR-545-5p | UCAGUAAAUGUUUAUUA | 3119 | UCAUCUAAUAAACAUUUA | 3120 |
| | GAUGA | | CUGA | |
| miR-548a-3p | CAAAACUGGCAAUUACU | 3121 | GCAAAAGUAAUUGCCAGU | 3122 |
| | UUUGC | | UUUG | |
| miR-548a-5p | AAAAGUAAUUGCGAGUU | 3123 | GGUAAAACUCGCAAUUAC | 3124 |
| | UUACC | | UUUU | |
| miR-548aa | AAAAACCACAAUUACUU | 3125 | UGGUGCAAAAGUAAUUG | 3126 |
| | UUGCACCA | | UGGUUUUU | |
| miR-548ab | AAAAGUAAUUGUGGAUU | 3127 | AGCAAAAUCCACAAUUAC | 3128 |
| | UUGCU | | UUUU | |
| miR-548ac | CAAAAACCGGCAAUUAC | 3129 | CAAAAGUAAUUGCCGGUU | 3130 |
| | UUUUG | | UUUG | |
| miR-548ad | GAAAACGACAAUGACUU | 3131 | UGCAAAAGUCAUUGUCGU | 3132 |
| | UUGCA | | UUUC | |
| miR-548ae | CAAAAACUGCAAUUACU | 3133 | UGAAAGUAAUUGCAGUU | 3134 |
| | UUCA | | UUUG | |
| miR-548ag | AAAGGUAAUUGUGGUUU | 3135 | GCAGAAACCACAAUUACC | 3136 |
| | CUGC | | UUU | |
| miR-548ah-3p | CAAAAACUGCAGUUACU | 3137 | GCAAAAGUAACUGCAGUU | 3138 |
| | UUUGC | | UUUG | |
| miR-548ah-5p | AAAAGUGAUUGCAGUGU | 3139 | CAAACACUGCAAUCACUU | 3140 |
| | UUG | | UU | |
| miR-548ai | AAAGGUAAUUGCAGUUU | 3141 | GGGAAAAACUGCAAUUAC | 3142 |
| | UUCCC | | CUUU | |
| miR-548aj-3p | UAAAAACUGCAAUUACU | 3143 | UAAAAGUAAUUGCAGUU | 3144 |
| | UUUA | | UUUA | |
| miR-548aj-5p | UGCAAAAGUAAUUGCAG | 3145 | CAAAAACUGCAAUUACUU | 3146 |
| | UUUUUG | | UUGCA | |
| miR-548ak | AAAAGUAACUGCGGUUU | 3147 | UCAAAAACCGCAGUUACU | 3148 |
| | UUGA | | UUU | |
| miR-548al | AACGGCAAUGACUUUUG | 3149 | UGGUACAAAAGUCAUUGC | 3150 |
| | UACCA | | CGUU | |
| miR-548am-3p | CAAAAACUGCAGUUACU | 3151 | ACAAAAGUAACUGCAGUU | 3152 |
| | UUUGU | | UUUG | |
| miR-548am-5p | AAAAGUAAUUGCGGUUU | 3153 | GGCAAAAACCGCAAUUAC | 3154 |
| | UUGCC | | UUUU | |
| miR-548an | AAAAGGCAUUGUGGUUU | 3155 | CAAAAACCACAAUGCCUU | 3156 |
| | UUG | | UU | |
| miR-548ao-3p | AAAGACCGUGACUACUU | 3157 | UGCAAAAGUAGUCACGGU | 3158 |
| | UUGCA | | CUUU | |
| miR-548ao-5p | AGAAGUAACUACGGUUU | 3159 | UGCAAAAACCGUAGUUAC | 3160 |
| | UUGCA | | UUCU | |
| miR-548ap-3pu | AAAAACCACAAUUACUUu | 3161 | AAAAGUAAUUGUGGUUU | 3162 |
| | UU | | UU | |
| miR-548ap-5puu | AAAAGUAAUUGCGGUCU | 3163 | AAAGACCGCAAUUACUUU | 3164 |
| | UU | | U | |
| miR-548aq-3p | CAAAAACUGCAAUUACU | 3165 | GCAAAAGUAAUUGCAGU | 3166 |
| | UUUGC | | UUUUG | |
| miR-548aq-5p | GAAAGUAAUUGCUGUUU | 3167 | GGCAAAAACAGCAAUUAC | 3168 |
| | UUGCC | | UUUC | |
| miR-548ar-3p | UAAAACUGCAGUUAUUU | 3169 | GCAAAAAUAACUGCAGUU | 3170 |
| | UUGC | | UUA | |
| miR-548ar-5p | AAAAGUAAUUGCAGUUU | 3171 | GCAAAAACUGCAAUUACU | 3172 |
| | UUGC | | UUU | |
| miR-548as-3p | UAAAACCCACAAUUAUG | 3173 | ACAAACAUAAUUGUGGG | 3174 |
| | UUUGU | | UUUUA | |
| miR-548as-5p | AAAAGUAAUUGCGGGUU | 3175 | GGCAAAACCCGCAAUUAC | 3176 |
| | UUGCC | | UUUU | |
| miR-548at-3p | CAAAACCGCAGUAACUU | 3177 | ACAAAAGUUACUGCGGUU | 3178 |
| | UUGU | | UUG | |
| miR-548at-5p | AAAAGUUAUUGCGGUUU | 3179 | AGCCAAAACCGCAAUAAC | 3180 |
| | UGGCU | | UUUU | |
| miR-548au-3p | UGGCAGUUACUUUUGCA | 3181 | CUGGUGCAAAAGUAACUG | 3182 |
| | CCAG | | CCA | |
| miR-548au-5p | AAAAGUAAUUGCGGUUU | 3183 | GCAAAAACCGCAAUUACU | 3184 |
| | UUGC | | UUU | |
| miR-548av-3p | AAACUGCAGUUACUUU | 3185 | GCAAAAGUAACUGCAGUU | 3186 |
| | UGC | | UU | |
| miR-548av-5p | AAAAGUACUUGCGGAUU | 3187 | AAAUCCGCAAGUACUUUU | 3188 |
| | U | | | |
| miR-548aw | GUGCAAAAGUCAUCACG | 3189 | AACCGUGAUGACUUUUGC | 3190 |
| | GUU | | AC | |
| miR-548ax | AGAAGUAAUUGCGGUUU | 3191 | UGGCAAAACCGCAAUUAC | 3192 |
| | UGCCA | | UUCU | |
| miR-548b-3p | CAAGAACCUCAGUUGCU | 3193 | ACAAAAGCAACUGAGGUU | 3194 |
| | UUUGU | | CUUG | |
| miR-548b-5p | AAAAGUAAUUGUGGUUU | 3195 | GGCCAAAACCACAAUUAC | 3196 |
| | UGGCC | | UUUU | |
| miR-548c-3p | CAAAAAUCUCAAUUACU | 3197 | GCAAAAGUAAUUGAGAU | 3198 |
| | UUUGC | | UUUUG | |
| miR-548c-5p | AAAAGUAAUUGCGGUUU | 3199 | GGCAAAAACCGCAAUUAC | 3200 |
| | UUGCC | | UUUU | |
| miR-548d-3p | CAAAAACCACAGUUUCU | 3201 | GCAAAAGAAACUGUGGU | 3202 |
| | UUUGC | | UUUUG | |
| miR-548d-5p | AAAAGUAAUUGUGGUUU | 3203 | GGCAAAAACCACAAUUAC | 3204 |
| | UUGCC | | UUUU | |
| miR-548e | AAAAACUGAGACUACUU | 3205 | UGCAAAAGUAGUCUCAGU | 3206 |
| | UUGCA | | UUUU | |
| miR-548f | AAAAACUGUAAUUACUU | 3207 | AAAAGUAAUUACAGUUU | 3208 |
| | UU | | UU | |
| miR-548g-3p | AAAACUGUAAUUACUUU | 3209 | GUACAAAAGUAAUUACA | 3210 |
| | UGUAC | | GUUUU | |
| miR-548g-5p | UGCAAAAGUAAUUGCAG | 3211 | CAAAAACUGCAAUUACUU | 3212 |
| | UUUUUG | | UUGCA | |
| miR-548h-3p | CAAAAACCGCAAUUACU | 3213 | UGCAAAAGUAAUUGCGG | 3214 |
| | UUUGCA | | UUUUUG | |
| miR-548h-5p | AAAAGUAAUCGCGGUUU | 3215 | GACAAAAACCGCGAUUAC | 3216 |
| | UUGUC | | UUUU | |
| miR-548i | AAAAGUAAUUGCGGAUU | 3217 | GGCAAAAUCCGCAAUUAC | 3218 |
| | UUGCC | | UUUU | |
| miR-548j | AAAAGUAAUUGCGGUCU | 3219 | ACCAAAGACCGCAAUUAC | 3220 |
| | UUGGU | | UUUU | |
| miR-548k | AAAAGUACUUGCGGAUU | 3221 | AGCAAAAUCCGCAAGUAC | 3222 |
| | UUGCU | | UUUU | |
| miR-548l | AAAAGUAUUUGCGGGUU | 3223 | GACAAAACCCGCAAAUAC | 3224 |
| | UUGUC | | UUUU | |
| miR-548m | CAAAGGUAUUUGUGGUU | 3225 | CAAAAACCACAAAUACCU | 3226 |
| | UUUG | | UUG | |
| miR-548n | CAAAAGUAAUUGUGGAU | 3227 | ACAAAAUCCACAAUUACU | 3228 |
| | UUUGU | | UUUG | |
| miR-548o-3p | CCAAAACUGCAGUUACU | 3229 | GCAAAAGUAACUGCAGUU | 3230 |
| | UUUGC | | UUGG | |
| miR-548o-5p | AAAAGUAAUUGCGGUUU | 3231 | GGCAAAAACCGCAAUUAC | 3232 |
| | UUGCC | | UUUU | |
| miR-548p | UAGCAAAAACUGCAGUU | 3233 | AAAGUAACUGCAGUUUU | 3234 |
| | ACUUU | | UGCUA | |
| miR-548q | GCUGGUGCAAAAGUAAU | 3235 | CCGCCAUUACUUUUGCAC | 3236 |
| | GGCGG | | CAGC | |
| miR-548s | AUGGCCAAAACUGCAGU | 3237 | AAAAUAACUGCAGUUUU | 3238 |
| | UAUUUU | | GGCCAU | |
| miR-548t-3p | AAAAACCACAAUUACUU | 3239 | UGGUGCAAAAGUAAUUG | 3240 |
| | UUGCACCA | | UGGUUUUU | |
| miR-548t-5p | CAAAAGUGAUCGUGGUU | 3241 | CAAAAACCACGAUCACUU | 3242 |
| | UUUG | | UUG | |
| miR-548u | CAAAGACUGCAAUUACU | 3243 | CGCAAAAGUAAUUGCAGU | 3244 |
| | UUUGCG | | CUUUG | |
| miR-548v | AGCUACAGUUACUUUUG | 3245 | UGGUGCAAAAGUAACUG | 3246 |
| | CACCA | | UAGCU | |
| miR-548w | AAAAGUAACUGCGGUUU | 3247 | AGGCAAAAACCGCAGUUA | 3248 |
| | UUGCCU | | CUUUU | |
| miR-548x-3p | UAAAAACUGCAAUUACU | 3249 | GAAAGUAAUUGCAGUUU | 3250 |
| | UUC | | UUA | |
| miR-548x-5p | UGCAAAAGUAAUUGCAG | 3251 | CAAAAACUGCAAUUACUU | 3252 |
| | UUUUUG | | UUGCA | |
| miR-548y | AAAAGUAAUCACUGUUU | 3253 | GGCAAAAACAGUGAUUAC | 3254 |
| | UUGCC | | UUUU | |
| miR-548z | CAAAAACCGCAAUUACU | 3255 | UGCAAAAGUAAUUGCGG | 3256 |
| | UUUGCA | | UUUUUG | |
| miR-549 | UGACAACUAUGGAUGAG | 3257 | AGAGCUCAUCCAUAGUUG | 3258 |
| | CUCU | | UCA | |
| miR-550a-3-5p | AGUGCCUGAGGGAGUAA | 3259 | CUCUUACUCCCUCAGGCA | 3260 |
| | GAG | | CU | |
| miR-550a-3p | UGUCUUACUCCCUCAGG | 3261 | AUGUGCCUGAGGGAGUA | 3262 |
| | CACAU | | AGACA | |
| miR-550a-5p | AGUGCCUGAGGGAGUAA | 3263 | GGGCUCUUACUCCCUCAG | 3264 |
| | GAGCCC | | GCACU | |
| miR-550b-2-5p | AUGUGCCUGAGGGAGUA | 3265 | UGUCUUACUCCCUCAGGC | 3266 |
| | AGACA | | ACAU | |
| miR-550b-3p | UCUUACUCCCUCAGGCA | 3267 | CAGUGCCUGAGGGAGUAA | 3268 |
| | CUG | | GA | |
| miR-551a | GCGACCCACUCUUGGUU | 3269 | UGGAAACCAAGAGUGGG | 3270 |
| | UCCA | | UCGC | |
| miR-551b-3p | GCGACCCAUACUUGGUU | 3271 | CUGAAACCAAGUAUGGGU | 3272 |
| | UCAG | | CGC | |
| miR-551b-5p | GAAAUCAAGCGUGGGUG | 3273 | GGUCUCACCCACGCUUGA | 3274 |
| | AGACC | | UUUC | |
| miR-552 | AACAGGUGACUGGUUAG | 3275 | UUGUCUAACCAGUCACCU | 3276 |
| | ACAA | | GUU | |
| miR-553 | AAAACGGUGAGAUUUUG | 3277 | AAAACAAAAUCUCACCGU | 3278 |
| | UUUU | | UUU | |
| miR-554 | GCUAGUCCUGACUCAGC | 3279 | ACUGGCUGAGUCAGGACU | 3280 |
| | CAGU | | AGC | |
| miR-555 | AGGGUAAGCUGAACCUC | 3281 | AUCAGAGGUUCAGCUUAC | 3282 |
| | UGAU | | CCU | |
| miR-556-3p | AUAUUACCAUUAGCUCA | 3283 | AAAGAUGAGCUAAUGGU | 3284 |
| | UCUUU | | AAUAU | |
| miR-556-5p | GAUGAGCUCAUUGUAAU | 3285 | CUCAUAUUACAAUGAGCU | 3286 |
| | AUGAG | | CAUC | |
| miR-557 | GUUUGCACGGGUGGGCC | 3287 | AGACAAGGCCCACCCGUG | 3288 |
| | UUGUCU | | CAAAC | |
| miR-5571-3p | GUCCUAGGAGGCUCCUC | 3289 | CAGAGGAGCCUCCUAGGA | 3290 |
| | UG | | C | |
| miR-5571-5p | CAAUUCUCAAAGGAGCC | 3291 | GGGAGGCUCCUUUGAGAA | 3292 |
| | UCCC | | UUG | |
| miR-5572 | GUUGGGGUGCAGGGGUC | 3293 | AGCAGACCCCUGCACCCC | 3294 |
| | UGCU | | AAC | |
| miR-5579-3p | UUAGCUUAAGGAGUACC | 3295 | GAUCUGGUACUCCUUAAG | 3296 |
| | AGAUC | | CUAA | |
| miR-5579-5p | UAUGGUACUCCUUAAGC | 3297 | GUUAGCUUAAGGAGUACC | 3298 |
| | UAAC | | AUA | |
| miR-558 | UGAGCUGCUGUACCAAA | 3299 | AUUUUGGUACAGCAGCUC | 3300 |
| | AU | | A | |
| miR-5580-3p | CACAUAUGAAGUGAGCC | 3301 | GUGCUGGCUCACUUCAUA | 3302 |
| | AGCAC | | UGUG | |
| miR-5580-5p | UGCUGGCUCAUUUCAUA | 3303 | ACACAUAUGAAAUGAGCC | 3304 |
| | UGUGU | | AGCA | |
| miR-5581-3p | UUCCAUGCCUCCUAGAA | 3305 | GGAACUUCUAGGAGGCAU | 3306 |
| | GUUCC | | GGAA | |
| miR-5581-5p | AGCCUUCCAGGAGAAAU | 3307 | UCUCCAUUUCUCCUGGAA | 3308 |
| | GGAGA | | GGCU | |
| miR-5582-3p | UAAAACUUUAAGUGUGC | 3309 | CCUAGGCACACUUAAAGU | 3310 |
| | CUAGG | | UUUA | |
| miR-5582-5p | UAGGCACACUUAAAGUU | 3311 | GCUAUAACUUUAAGUGU | 3312 |
| | AUAGC | | GCCUA | |
| miR-5583-3p | GAAUAUGGGUAUAUUAG | 3313 | CCAAACUAAUAUACCCAU | 3314 |
| | UUUGG | | AUUC | |
| miR-5583-5p | AAACUAAUAUACCCAUA | 3315 | CAGAAUAUGGGUAUAUU | 3316 |
| | UUCUG | | AGUUU | |
| miR-5584-3p | UAGUUCUUCCCUUUGCC | 3317 | AAUUGGGCAAAGGGAAG | 3318 |
| | CAAUU | | AACUA | |
| miR-5584-5p | CAGGGAAAUGGGAAGAA | 3319 | UCUAGUUCUUCCCAUUUC | 3320 |
| | CUAGA | | CCUG | |
| miR-5585-3p | CUGAAUAGCUGGGACUA | 3321 | ACCUGUAGUCCCAGCUAU | 3322 |
| | CAGGU | | UCAG | |
| miR-5585-5p | UGAAGUACCAGCUACUC | 3323 | CUCUCGAGUAGCUGGUAC | 3324 |
| | GAGAG | | UUCA | |
| miR-5586-3p | CAGAGUGACAAGCUGGU | 3325 | CUUUAACCAGCUUGUCAC | 3326 |
| | UAAAG | | UCUG | |
| miR-5586-5p | UAUCCAGCUUGUUACUA | 3327 | GCAUAUAGUAACAAGCUG | 3328 |
| | UAUGC | | GAUA | |
| miR-5587-3p | GCCCCGGGCAGUGUGAU | 3329 | GAUGAUCACACUGCCCGG | 3330 |
| | CAUC | | GGC | |
| miR-5587-5p | AUGGUCACCUCCGGGAC | 3331 | AGUCCCGGAGGUGACCAU | 3332 |
| | U | | | |
| miR-5588-3p | AAGUCCCACUAAUGCCA | 3333 | GCUGGCAUUAGUGGGACU | 3334 |
| | GC | | U | |
| miR-5588-5p | ACUGGCAUUAGUGGGAC | 3335 | AAAAGUCCCACUAAUGCC | 3336 |
| | UUUU | | AGU | |
| miR-5589-3p | UGCACAUGGCAACCUAG | 3337 | UGGGAGCUAGGUUGCCAU | 3338 |
| | CUCCCA | | GUGCA | |
| miR-5589-5p | GGCUGGGUGCUCUUGUG | 3339 | ACUGCACAAGAGCACCCA | 3340 |
| | CAGU | | GCC | |
| miR-559 | UAAAGUAAAUAUGCACC | 3341 | UUUUGGUGCAUAUUUAC | 3342 |
| | AAAA | | UUUA | |
| miR-5590-3p | AAUAAAGUUCAUGUAUG | 3343 | UUGCCAUACAUGAACUUU | 3344 |
| | GCAA | | AUU | |
| miR-5590-5p | UUGCCAUACAUAGACUU | 3345 | AAUAAAGUCUAUGUAUG | 3346 |
| | UAUU | | GCAA | |
| miR-5591-3p | AUACCCAUAGCUUAGCU | 3347 | UGGGAGCUAAGCUAUGG | 3348 |
| | CCCA | | GUAU | |
| miR-5591-5p | UGGGAGCUAAGCUAUGG | 3349 | AUACCCAUAGCUUAGCUC | 3350 |
| | GUAU | | CCA | |
| miR-561-3p | CAAAGUUUAAGAUCCUU | 3351 | ACUUCAAGGAUCUUAAAC | 3352 |
| | GAAGU | | UUUG | |
| miR-561-5p | AUCAAGGAUCUUAAACU | 3353 | GGCAAAGUUUAAGAUCCU | 3354 |
| | UUGCC | | UGAU | |
| miR-562 | AAAGUAGCUGUACCAUU | 3355 | GCAAAUGGUACAGCUACU | 3356 |
| | UGC | | UU | |
| miR-563 | AGGUUGACAUACGUUUC | 3357 | GGGAAACGUAUGUCAACC | 3358 |
| | CC | | U | |
| miR-564 | AGGCACGGUGUCAGCAG | 3359 | GCCUGCUGACACCGUGCC | 3360 |
| | GC | | U | |
| miR-566 | GGGCGCCUGUGAUCCCA | 3361 | GUUGGGAUCACAGGCGCC | 3362 |
| | AC | | C | |
| miR-567 | AGUAUGUUCUUCCAGGA | 3363 | GUUCUGUCCUGGAAGAAC | 3364 |
| | CAGAAC | | AUACU | |
| miR-568 | AUGUAUAAAUGUAUACA | 3365 | GUGUGUAUACAUUUAUA | 3366 |
| | CAC | | CAU | |
| miR-5680 | GAGAAAUGCUGGACUAA | 3367 | GCAGAUUAGUCCAGCAUU | 3368 |
| | UCUGC | | UCUC | |
| miR-5681a | AGAAAGGGUGGCAAUAC | 3369 | AAGAGGUAUUGCCACCCU | 3370 |
| | CUCUU | | UUCU | |
| miR-5681b | AGGUAUUGCCACCCUUU | 3371 | ACUAGAAAGGGUGGCAA | 3372 |
| | CUAGU | | UACCU | |
| miR-5682 | GUAGCACCUUGCAGGAU | 3373 | ACCUUAUCCUGCAAGGUG | 3374 |
| | AAGGU | | CUAC | |
| miR-5683 | UACAGAUGCAGAUUCUC | 3375 | GAAGUCAGAGAAUCUGCA | 3376 |
| | UGACUUC | | UCUGUA | |
| miR-5684 | AACUCUAGCCUGAGCAA | 3377 | CUGUUGCUCAGGCUAGAG | 3378 |
| | CAG | | UU | |
| miR-5685 | ACAGCCCAGCAGUUAUC | 3379 | CCCGUGAUAACUGCUGGG | 3380 |
| | ACGGG | | CUGU | |
| miR-5686 | UAUCGUAUCGUAUUGUA | 3381 | ACAAUACAAUACGAUACG | 3382 |
| | UUGU | | AUA | |
| miR-5687 | UUAGAACGUUUUAGGGU | 3383 | AUUUGACCCUAAAACGUU | 3384 |
| | CAAAU | | CUAA | |
| miR-5688 | UAACAAACACCUGUAAA | 3385 | GCUGUUUUACAGGUGUU | 3386 |
| | ACAGC | | UGUUA | |
| miR-5689 | AGCAUACACCUGUAGUC | 3387 | UCUAGGACUACAGGUGUA | 3388 |
| | CUAGA | | UGCU | |
| miR-569 | AGUUAAUGAAUCCUGGA | 3389 | ACUUUCCAGGAUUCAUUA | 3390 |
| | AAGU | | ACU | |
| miR-5690 | UCAGCUACUACCUCUAU | 3391 | CCUAAUAGAGGUAGUAGC | 3392 |
| | UAGG | | UGA | |
| miR-5691 | UUGCUCUGAGCUCCGAG | 3393 | GCUUUCUCGGAGCUCAGA | 3394 |
| | AAAGC | | GCAA | |
| miR-5692a | CAAAUAAUACCACAGUG | 3395 | ACACCCACUGUGGUAUUA | 3396 |
| | GGUGU | | UUUG | |
| miR-5692b | AAUAAUAUCACAGUAGG | 3397 | ACACCUACUGUGAUAUUA | 3398 |
| | UGU | | UU | |
| miR-5692c | AAUAAUAUCACAGUAGG | 3399 | GUACACCUACUGUGAUAU | 3400 |
| | UGUAC | | UAUU | |
| miR-5693 | GCAGUGGCUCUGAAAUG | 3401 | GAGUUCAUUUCAGAGCCA | 3402 |
| | AACUC | | CUGC | |
| miR-5694 | CAGAUCAUGGGACUGUC | 3403 | CUGAGACAGUCCCAUGAU | 3404 |
| | UCAG | | CUG | |
| miR-5695 | ACUCCAAGAAGAAUCUA | 3405 | CUGUCUAGAUUCUUCUUG | 3406 |
| | GACAG | | GAGU | |
| miR-5696 | CUCAUUUAAGUAGUCUG | 3407 | GGCAUCAGACUACUUAAA | 3408 |
| | AUGCC | | UGAG | |
| miR-5697 | UCAAGUAGUUUCAUGAU | 3409 | CCUUUAUCAUGAAACUAC | 3410 |
| | AAAGG | | UUGA | |
| miR-5698 | UGGGGGAGUGCAGUGAU | 3411 | CCACAAUCACUGCACUCC | 3412 |
| | UGUGG | | CCCA | |
| miR-5699 | UCCUGUCUUUCCUUGUU | 3413 | GCUCCAACAAGGAAAGAC | 3414 |
| | GGAGC | | AGGA | |
| miR-570-3p | CGAAAACAGCAAUUACC | 3415 | GCAAAGGUAAUUGCUGU | 3416 |
| | UUUGC | | UUUCG | |
| miR-570-5p | AAAGGUAAUUGCAGUUU | 3417 | GGGAAAAACUGCAAUUAC | 3418 |
| | UUCCC | | CUUU | |
| miR-5700 | UAAUGCAUUAAAUUAUU | 3419 | CCUUCAAUAAUUUAAUGC | 3420 |
| | GAAGG | | AUUA | |
| miR-5701 | UUAUUGUCACGUUCUGA | 3421 | AAUCAGAACGUGACAAUA | 3422 |
| | UU | | A | |
| miR-5702 | UGAGUCAGCAACAUAUC | 3423 | CAUGGGAUAUGUUGCUG | 3424 |
| | CCAUG | | ACUCA | |
| miR-5703 | AGGAGAAGUCGGGAAGG | 3425 | ACCUUCCCGACUUCUCCU | 3426 |
| | U | | | |
| miR-5704 | UUAGGCCAUCAUCCCAU | 3427 | GCAUAAUGGGAUGAUGG | 3428 |
| | UAUGC | | CCUAA | |
| miR-5705 | UGUUUCGGGGCUCAUGG | 3429 | CACAGGCCAUGAGCCCCG | 3430 |
| | CCUGUG | | AAACA | |
| miR-5706 | UUCUGGAUAACAUGCUG | 3431 | AGCUUCAGCAUGUUAUCC | 3432 |
| | AAGCU | | AGAA | |
| miR-5707 | ACGUUUGAAUGCUGUAC | 3433 | GCCUUGUACAGCAUUCAA | 3434 |
| | AAGGC | | ACGU | |
| miR-5708 | AUGAGCGACUGUGCCUG | 3435 | GGUCAGGCACAGUCGCUC | 3436 |
| | ACC | | AU | |
| miR-571 | UGAGUUGGCCAUCUGAG | 3437 | CUCACUCAGAUGGCCAAC | 3438 |
| | UGAG | | UCA | |
| miR-572 | GUCCGCUCGGCGGUGGC | 3439 | UGGGCCACCGCCGAGCGG | 3440 |
| | CCA | | AC | |
| miR-573 | CUGAAGUGAUGUGUAAC | 3441 | CUGAUCAGUUACACAUCA | 3442 |
| | UGAUCAG | | CUUCAG | |
| miR-574-3p | CACGCUCAUGCACACAC | 3443 | UGUGGGUGUGUGCAUGA | 3444 |
| | CCACA | | GCGUG | |
| miR-574-5p | UGAGUGUGUGUGUGUGA | 3445 | ACACACUCACACACACAC | 3446 |
| | GUGUGU | | ACUCA | |
| miR-575 | GAGCCAGUUGGACAGGA | 3447 | GCUCCUGUCCAACUGGCU | 3448 |
| | GC | | C | |
| miR-576-3p | AAGAUGUGGAAAAAUUG | 3449 | GAUUCCAAUUUUUCCACA | 3450 |
| | GAAUC | | UCUU | |
| miR-576-5p | AUUCUAAUUUCUCCACG | 3451 | AAAGACGUGGAGAAAUU | 3452 |
| | UCUUU | | AGAAU | |
| miR-577 | UAGAUAAAAUAUUGGUA | 3453 | CAGGUACCAAUAUUUUAU | 3454 |
| | CCUG | | CUA | |
| miR-578 | CUUCUUGUGCUCUAGGA | 3455 | ACAAUCCUAGAGCACAAG | 3456 |
| | UUGU | | AAG | |
| miR-579 | UUCAUUUGGUAUAAACC | 3457 | AAUCGCGGUUUAUACCAA | 3458 |
| | GCGAUU | | AUGAA | |
| miR-580 | UUGAGAAUGAUGAAUCA | 3459 | CCUAAUGAUUCAUCAUUC | 3460 |
| | UUAGG | | UCAA | |
| miR-581 | UCUUGUGUUCUCUAGAU | 3461 | ACUGAUCUAGAGAACACA | 3462 |
| | CAGU | | AGA | |
| miR-582-3p | UAACUGGUUGAACAACU | 3463 | GGUUCAGUUGUUCAACCA | 3464 |
| | GAACC | | GUUA | |
| miR-582-5p | UUACAGUUGUUCAACCA | 3465 | AGUAACUGGUUGAACAAC | 3466 |
| | GUUACU | | UGUAA | |
| miR-583 | CAAAGAGGAAGGUCCCA | 3467 | GUAAUGGGACCUUCCUCU | 3468 |
| | UUAC | | UUG | |
| miR-584-3p | UCAGUUCCAGGCCAACC | 3469 | AGCCUGGUUGGCCUGGAA | 3470 |
| | AGGCU | | CUGA | |
| miR-584-5p | UUAUGGUUUGCCUGGGA | 3471 | CUCAGUCCCAGGCAAACC | 3472 |
| | CUGAG | | AUAA | |
| miR-585 | UGGGCGUAUCUGUAUGC | 3473 | UAGCAUACAGAUACGCCC | 3474 |
| | UA | | A | |
| miR-586 | UAUGCAUUGUAUUUUUA | 3475 | GGACCUAAAAAUACAAUG | 3476 |
| | GGUCC | | CAUA | |
| miR-587 | UUUCCAUAGGUGAUGAG | 3477 | GUGACUCAUCACCUAUGG | 3478 |
| | UCAC | | AAA | |
| miR-588 | UUGGCCACAAUGGGUUA | 3479 | GUUCUAACCCAUUGUGGC | 3480 |
| | GAAC | | CAA | |
| miR-589-3p | UCAGAACAAAUGCCGGU | 3481 | UCUGGGAACCGGCAUUUG | 3482 |
| | UCCCAGA | | UUCUGA | |
| miR-589-5p | UGAGAACCACGUCUGCU | 3483 | CUCAGAGCAGACGUGGUU | 3484 |
| | CUGAG | | CUCA | |
| miR-590-3p | UAAUUUUAUGUAUAAGC | 3485 | ACUAGCUUAUACAUAAAA | 3486 |
| | UAGU | | UUA | |
| miR-590-5p | GAGCUUAUUCAUAAAAG | 3487 | CUGCACUUUUAUGAAUAA | 3488 |
| | UGCAG | | GCUC | |
| miR-591 | AGACCAUGGGUUCUCAU | 3489 | ACAAUGAGAACCCAUGGU | 3490 |
| | UGU | | CU | |
| miR-592 | UUGUGUCAAUAUGCGAU | 3491 | ACAUCAUCGCAUAUUGAC | 3492 |
| | GAUGU | | ACAA | |
| miR-593-3p | UGUCUCUGCUGGGGUUU | 3493 | AGAAACCCCAGCAGAGAC | 3494 |
| | CU | | A | |
| miR-593-5p | AGGCACCAGCCAGGCAU | 3495 | GCUGAGCAAUGCCUGGCU | 3496 |
| | UGCUCAGC | | GGUGCCU | |
| miR-595 | GAAGUGUGCCGUGGUGU | 3497 | AGACACACCACGGCACAC | 3498 |
| | GUCU | | UUC | |
| miR-596 | AAGCCUGCCCGGCUCCU | 3499 | CCCGAGGAGCCGGGCAGG | 3500 |
| | CGGG | | CUU | |
| miR-597 | UGUGUCACUCGAUGACC | 3501 | ACAGUGGUCAUCGAGUGA | 3502 |
| | ACUGU | | CACA | |
| miR-598 | UACGUCAUCGUUGUCAU | 3503 | UGACGAUGACAACGAUGA | 3504 |
| | CGUCA | | CGUA | |
| miR-599 | GUUGUGUCAGUUUAUCA | 3505 | GUUUGAUAAACUGACACA | 3506 |
| | AAC | | AC | |
| miR-600 | ACUUACAGACAAGAGCC | 3507 | GAGCAAGGCUCUUGUCUG | 3508 |
| | UUGCUC | | UAAGU | |
| miR-601 | UGGUCUAGGAUUGUUGG | 3509 | CUCCUCCAACAAUCCUAG | 3510 |
| | AGGAG | | ACCA | |
| miR-602 | GACACGGGCGACAGCUG | 3511 | GGGCCGCAGCUGUCGCCC | 3512 |
| | CGGCCC | | GUGUC | |
| miR-603 | CACACACUGCAAUUACU | 3513 | GCAAAAGUAAUUGCAGU | 3514 |
| | UUUGC | | GUGUG | |
| miR-604 | AGGCUGCGGAAUUCAGG | 3515 | GUCCUGAAUUCCGCAGCC | 3516 |
| | AC | | U | |
| miR-605 | UAAAUCCCAUGGUGCCU | 3517 | AGGAGAAGGCACCAUGGG | 3518 |
| | UCUCCU | | AUUUA | |
| miR-606 | AAACUACUGAAAAUCAA | 3519 | AUCUUUGAUUUUCAGUA | 3520 |
| | AGAU | | GUUU | |
| miR-607 | GUUCAAAUCCAGAUCUA | 3521 | GUUAUAGAUCUGGAUUU | 3522 |
| | UAAC | | GAAC | |
| miR-608 | AGGGGUGGUGUUGGGAC | 3523 | ACGGAGCUGUCCCAACAC | 3524 |
| | AGCUCCGU | | CACCCCU | |
| miR-609 | AGGGUGUUUCUCUCAUC | 3525 | AGAGAUGAGAGAAACACC | 3526 |
| | UCU | | CU | |
| miR-610 | UGAGCUAAAUGUGUGCU | 3527 | UCCCAGCACACAUUUAGC | 3528 |
| | GGGA | | UCA | |
| miR-611 | GCGAGGACCCCUCGGGG | 3529 | GUCAGACCCCGAGGGGUC | 3530 |
| | UCUGAC | | CUCGC | |
| miR-612 | GCUGGGCAGGGCUUCUG | 3531 | AAGGAGCUCAGAAGCCCU | 3532 |
| | AGCUCCUU | | GCCCAGC | |
| miR-613 | AGGAAUGUUCCUUCUUU | 3533 | GGCAAAGAAGGAACAUUC | 3534 |
| | GCC | | CU | |
| miR-614 | GAACGCCUGUUCUUGCC | 3535 | CCACCUGGCAAGAACAGG | 3536 |
| | AGGUGG | | CGUUC | |
| miR-615-3p | UCCGAGCCUGGGUCUCC | 3537 | AAGAGGGAGACCCAGGCU | 3538 |
| | CUCUU | | CGGA | |
| miR-615-5p | GGGGGUCCCCGGUGCUC | 3539 | GAUCCGAGCACCGGGGAC | 3540 |
| | GGAUC | | CCCC | |
| miR-616-3p | AGUCAUUGGAGGGUUUG | 3541 | CUGCUCAAACCCUCCAAU | 3542 |
| | AGCAG | | GACU | |
| miR-616-5p | ACUCAAAACCCUUCAGU | 3543 | AAGUCACUGAAGGGUUU | 3544 |
| | GACUU | | UGAGU | |
| miR-617 | AGACUUCCCAUUUGAAG | 3545 | GCCACCUUCAAAUGGGAA | 3546 |
| | GUGGC | | GUCU | |
| miR-618 | AAACUCUACUUGUCCUU | 3547 | ACUCAGAAGGACAAGUAG | 3548 |
| | CUGAGU | | AGUUU | |
| miR-619 | GACCUGGACAUGUUUGU | 3549 | ACUGGGCACAAACAUGUC | 3550 |
| | GCCCAGU | | CAGGUC | |
| miR-620 | AUGGAGAUAGAUAUAGA | 3551 | AUUUCUAUAUCUAUCUCC | 3552 |
| | AAU | | AU | |
| miR-621 | GGCUAGCAACAGCGCUU | 3553 | AGGUAAGCGCUGUUGCUA | 3554 |
| | ACCU | | GCC | |
| miR-622 | ACAGUCUGCUGAGGUUG | 3555 | GCUCCAACCUCAGCAGAC | 3556 |
| | GAGC | | UGU | |
| miR-623 | AUCCCUUGCAGGGGCUG | 3557 | ACCCAACAGCCCCUGCAA | 3558 |
| | UUGGGU | | GGGAU | |
| miR-624-3p | CACAAGGUAUUGGUAUU | 3559 | AGGUAAUACCAAUACCUU | 3560 |
| | ACCU | | GUG | |
| miR-624-5p | UAGUACCAGUACCUUGU | 3561 | UGAACACAAGGUACUGGU | 3562 |
| | GUUCA | | ACUA | |
| miR-625-3p | GACUAUAGAACUUUCCC | 3563 | UGAGGGGGAAAGUUCUA | 3564 |
| | CCUCA | | UAGUC | |
| miR-625-5p | AGGGGGAAAGUUCUAUA | 3565 | GGACUAUAGAACUUUCCC | 3566 |
| | GUCC | | CCU | |
| miR-626 | AGCUGUCUGAAAAUGUC | 3567 | AAGACAUUUUCAGACAGC | 3568 |
| | UU | | U | |
| miR-627 | GUGAGUCUCUAAGAAAA | 3569 | UCCUCUUUUCUUAGAGAC | 3570 |
| | GAGGA | | UCAC | |
| miR-628-3p | UCUAGUAAGAGUGGCAG | 3571 | UCGACUGCCACUCUUACU | 3572 |
| | UCGA | | AGA | |
| miR-628-5p | AUGCUGACAUAUUUACU | 3573 | CCUCUAGUAAAUAUGUCA | 3574 |
| | AGAGG | | GCAU | |
| miR-629-3p | GUUCUCCCAACGUAAGC | 3575 | GCUGGGCUUACGUUGGGA | 3576 |
| | CCAGC | | GAAC | |
| miR-629-5p | UGGGUUUACGUUGGGAG | 3577 | AGUUCUCCCAACGUAAAC | 3578 |
| | AACU | | CCA | |
| miR-630 | AGUAUUCUGUACCAGGG | 3579 | ACCUUCCCUGGUACAGAA | 3580 |
| | AAGGU | | UACU | |
| miR-631 | AGACCUGGCCCAGACCU | 3581 | GCUGAGGUCUGGGCCAGG | 3582 |
| | CAGC | | UCU | |
| miR-632 | GUGUCUGCUUCCUGUGG | 3583 | UCCCACAGGAAGCAGACA | 3584 |
| | GA | | C | |
| miR-633 | CUAAUAGUAUCUACCAC | 3585 | UUUAUUGUGGUAGAUAC | 3586 |
| | AAUAAA | | UAUUAG | |
| miR-634 | AACCAGCACCCCAACUU | 3587 | GUCCAAAGUUGGGGUGCU | 3588 |
| | UGGAC | | GGUU | |
| miR-635 | ACUUGGGCACUGAAACA | 3589 | GGACAUUGUUUCAGUGCC | 3590 |
| | AUGUCC | | CAAGU | |
| miR-636 | UGUGCUUGCUCGUCCCG | 3591 | UGCGGGCGGGACGAGCAA | 3592 |
| | CCCGCA | | GCACA | |
| miR-637 | ACUGGGGGCUUUCGGGC | 3593 | ACGCAGAGCCCGAAAGCC | 3594 |
| | UCUGCGU | | CCCAGU | |
| miR-638 | AGGGAUCGCGGGCGGGU | 3595 | AGGCCGCCACCCGCCCGC | 3596 |
| | GGCGGCCU | | GAUCCCU | |
| miR-639 | AUCGCUGCGGUUGCGAG | 3597 | ACAGCGCUCGCAACCGCA | 3598 |
| | CGCUGU | | GCGAU | |
| miR-640 | AUGAUCCAGGAACCUGC | 3599 | AGAGGCAGGUUCCUGGAU | 3600 |
| | CUCU | | CAU | |
| miR-641 | AAAGACAUAGGAUAGAG | 3601 | GAGGUGACUCUAUCCUAU | 3602 |
| | UCACCUC | | GUCUUU | |
| miR-642a-3p | AGACACAUUUGGAGAGG | 3603 | GGUUCCCUCUCCAAAUGU | 3604 |
| | GAACC | | GUCU | |
| miR-642a-5p | GUCCCUCUCCAAAUGUG | 3605 | CAAGACACAUUUGGAGAG | 3606 |
| | UCUUG | | GGAC | |
| miR-642b-3p | AGACACAUUUGGAGAGG | 3607 | GGGUCCCUCUCCAAAUGU | 3608 |
| | GACCC | | GUCU | |
| miR-642b-5p | GGUUCCCUCUCCAAAUG | 3609 | AGACACAUUUGGAGAGG | 3610 |
| | UGUCU | | GAACC | |
| miR-643 | ACUUGUAUGCUAGCUCA | 3611 | CUACCUGAGCUAGCAUAC | 3612 |
| | GGUAG | | AAGU | |
| miR-644a | AGUGUGGCUUUCUUAGA | 3613 | GCUCUAAGAAAGCCACAC | 3614 |
| | GC | | U | |
| miR-644b-3p | UUCAUUUGCCUCCCAGC | 3615 | UGUAGGCUGGGAGGCAA | 3616 |
| | CUACA | | AUGAA | |
| miR-644b-5p | UGGGCUAAGGGAGAUGA | 3617 | UACCCAAUCAUCUCCCUU | 3618 |
| | UUGGGUA | | AGCCCA | |
| miR-645 | UCUAGGCUGGUACUGCU | 3619 | UCAGCAGUACCAGCCUAG | 3620 |
| | GA | | A | |
| miR-646 | AAGCAGCUGCCUCUGAG | 3621 | GCCUCAGAGGCAGCUGCU | 3622 |
| | GC | | U | |
| miR-647 | GUGGCUGCACUCACUUC | 3623 | GAAGGAAGUGAGUGCAG | 3624 |
| | CUUC | | CCAC | |
| miR-648 | AAGUGUGCAGGGCACUG | 3625 | ACCAGUGCCCUGCACACU | 3626 |
| | GU | | U | |
| miR-649 | AAACCUGUGUUGUUCAA | 3627 | GACUCUUGAACAACACAG | 3628 |
| | GAGUC | | GUUU | |
| miR-650 | AGGAGGCAGCGCUCUCA | 3629 | GUCCUGAGAGCGCUGCCU | 3630 |
| | GGAC | | CCU | |
| miR-651 | UUUAGGAUAAGCUUGAC | 3631 | CAAAAGUCAAGCUUAUCC | 3632 |
| | UUUUG | | UAAA | |
| miR-652-3p | AAUGGCGCCACUAGGGU | 3633 | CACAACCCUAGUGGCGCC | 3634 |
| | UGUG | | AUU | |
| miR-652-5p | CAACCCUAGGAGAGGGU | 3635 | UGAAUGGCACCCUCUCCU | 3636 |
| | GCCAUUCA | | AGGGUUG | |
| miR-653 | GUGUUGAAACAAUCUCU | 3637 | CAGUAGAGAUUGUUUCA | 3638 |
| | ACUG | | ACAC | |
| miR-654-3p | UAUGUCUGCUGACCAUC | 3639 | AAGGUGAUGGUCAGCAG | 3640 |
| | ACCUU | | ACAUA | |
| miR-654-5p | UGGUGGGCCGCAGAACA | 3641 | GCACAUGUUCUGCGGCCC | 3642 |
| | UGUGC | | ACCA | |
| miR-655 | AUAAUACAUGGUUAACC | 3643 | AAAGAGGUUAACCAUGU | 3644 |
| | UCUUU | | AUUAU | |
| miR-656 | AAUAUUAUACAGUCAAC | 3645 | AGAGGUUGACUGUAUAA | 3646 |
| | CUCU | | UAUU | |
| miR-657 | GGCAGGUUCUCACCCUC | 3647 | CCUAGAGAGGGUGAGAAC | 3648 |
| | UCUAGG | | CUGCC | |
| miR-658 | GGCGGAGGGAAGUAGGU | 3649 | ACCAACGGACCUACUUCC | 3650 |
| | CCGUUGGU | | CUCCGCC | |
| miR-659-3p | CUUGGUUCAGGGAGGGU | 3651 | UGGGGACCCUCCCUGAAC | 3652 |
| | CCCCA | | CAAG | |
| miR-659-5p | AGGACCUUCCCUGAACC | 3653 | UCCUUGGUUCAGGGAAGG | 3654 |
| | AAGGA | | UCCU | |
| miR-660-3p | ACCUCCUGUGUGCAUGG | 3655 | UAAUCCAUGCACACAGGA | 3656 |
| | AUUA | | GGU | |
| miR-660-5p | UACCCAUUGCAUAUCGG | 3657 | CAACUCCGAUAUGCAAUG | 3658 |
| | AGUUG | | GGUA | |
| miR-661 | UGCCUGGGUCUCUGGCC | 3659 | ACGCGCAGGCCAGAGACC | 3660 |
| | UGCGCGU | | CAGGCA | |
| miR-662 | UCCCACGUUGUGGCCCA | 3661 | CUGCUGGGCCACAACGUG | 3662 |
| | GCAG | | GGA | |
| miR-663a | AGGCGGGGCGCCGCGGG | 3663 | GCGGTCCCGCGGCGCCCC | 3664 |
| | ACCGC | | GCCT | |
| miR-663b | GGUGGCCCGGCCGUGCC | 3665 | CCUCAGGCACGGCCGGGC | 3666 |
| | UGAGG | | CACC | |
| miR-664-3p | UAUUCAUUUAUCCCCAG | 3667 | UGUAGGCUGGGGAUAAA | 3668 |
| | CCUACA | | UGAAUA | |
| miR-664-5p | ACUGGCUAGGGAAAAUG | 3669 | AUCCAAUCAUUUUCCCUA | 3670 |
| | AUUGGAU | | GCCAGU | |
| miR-665 | ACCAGGAGGCUGAGGCC | 3671 | AGGGGCCUCAGCCUCCUG | 3672 |
| | CCU | | GU | |
| miR-668 | UGUCACUCGGCUCGGCC | 3673 | GUAGUGGGCCGAGCCGAG | 3674 |
| | CACUAC | | UGACA | |
| miR-670 | GUCCCUGAGUGUAUGUG | 3675 | CACCACAUACACUCAGGG | 3676 |
| | GUG | | AC | |
| miR-671-3p | UCCGGUUCUCAGGGCUC | 3677 | GGUGGAGCCCUGAGAACC | 3678 |
| | CACC | | GGA | |
| miR-671-5p | AGGAAGCCCUGGAGGGG | 3679 | CUCCAGCCCCUCCAGGGC | 3680 |
| | CUGGAG | | UUCCU | |
| miR-675-3p | CUGUAUGCCCUCACCGC | 3681 | UGAGCGGUGAGGGCAUAC | 3682 |
| | UCA | | AG | |
| miR-675-5p | UGGUGCGGAGAGGGCCC | 3683 | CACUGUGGGCCCUCUCCG | 3684 |
| | ACAGUG | | CACCA | |
| miR-676-3p | CUGUCCUAAGGUUGUUG | 3685 | AACUCAACAACCUUAGGA | 3686 |
| | AGUU | | CAG | |
| miR-676-5p | UCUUCAACCUCAGGACU | 3687 | UGCAAGUCCUGAGGUUGA | 3688 |
| | UGCA | | AGA | |
| miR-7-1-3p | CAACAAAUCACAGUCUG | 3689 | UAUGGCAGACUGUGAUU | 3690 |
| | CCAUA | | UGUUG | |
| miR-7-2-3p | CAACAAAUCCCAGUCUA | 3691 | UUAGGUAGACUGGGAUU | 3692 |
| | CCUAA | | UGUUG | |
| miR-7-5p | UGGAAGACUAGUGAUUU | 3693 | ACAACAAAAUCACUAGUC | 3694 |
| | UGUUGU | | UUCCA | |
| miR-708-3p | CAACUAGACUGUGAGCU | 3695 | CUAGAAGCUCACAGUCUA | 3696 |
| | UCUAG | | GUUG | |
| miR-708-5p | AAGGAGCUUACAAUCUA | 3697 | CCCAGCUAGAUUGUAAGC | 3698 |
| | GCUGGG | | UCCUU | |
| miR-711 | GGGACCCAGGGAGAGAC | 3699 | CUUACGUCUCUCCCUGGG | 3700 |
| | GUAAG | | UCCC | |
| miR-718 | CUUCCGCCCCGCCGGGC | 3701 | CGACGCCCGGCGGGGCGG | 3702 |
| | GUCG | | AAG | |
| miR-720 | UCUCGCUGGGGCCUCCA | 3703 | UGGAGGCCCCAGCGAGA | 3704 |
| miR-744-3p | CUGUUGCCACUAACCUC | 3705 | AGGUUGAGGUUAGUGGC | 3706 |
| | AACCU | | AACAG | |
| miR-744-5p | UGCGGGGCUAGGGCUAA | 3707 | UGCUGUUAGCCCUAGCCC | 3708 |
| | CAGCA | | CGCA | |
| miR-758 | UUUGUGACCUGGUCCAC | 3709 | GGUUAGUGGACCAGGUCA | 3710 |
| | UAACC | | CAAA | |
| miR-759 | GCAGAGUGCAAACAAUU | 3711 | GUCAAAAUUGUUUGCACU | 3712 |
| | UUGAC | | CUGC | |
| miR-760 | CGGCUCUGGGUCUGUGG | 3713 | UCCCCACAGACCCAGAGC | 3714 |
| | GGA | | CG | |
| miR-761 | GCAGCAGGGUGAAACUG | 3715 | UGUGUCAGUUUCACCCUG | 3716 |
| | ACACA | | CUGC | |
| miR-762 | GGGGCUGGGGCCGGGGC | 3717 | GCUCGGCCCCGGCCCCAG | 3718 |
| | CGAGC | | CCCC | |
| miR-764 | GCAGGUGCUCACUUGUC | 3719 | AGGAGGACAAGUGAGCAC | 3720 |
| | CUCCU | | CUGC | |
| miR-765 | UGGAGGAGAAGGAAGGU | 3721 | CAUCACCUUCCUUCUCCU | 3722 |
| | GAUG | | CCA | |
| miR-766-3p | ACUCCAGCCCCACAGCC | 3723 | GCUGAGGCUGUGGGGCUG | 3724 |
| | UCAGC | | GAGU | |
| miR-766-5p | AGGAGGAAUUGGUGCUG | 3725 | AAGACCAGCACCAAUUCC | 3726 |
| | GUCUU | | UCCU | |
| miR-767-3p | UCUGCUCAUACCCCAUG | 3727 | AGAAACCAUGGGGUAUG | 3728 |
| | GUUUCU | | AGCAGA | |
| miR-767-5p | UGCACCAUGGUUGUCUG | 3729 | CAUGCUCAGACAACCAUG | 3730 |
| | AGCAUG | | GUGCA | |
| miR-769-3p | CUGGGAUCUCCGGGGUC | 3731 | AACCAAGACCCCGGAGAU | 3732 |
| | UUGGUU | | CCCAG | |
| miR-769-5p | UGAGACCUCUGGGUUCU | 3733 | AGCUCAGAACCCAGAGGU | 3734 |
| | GAGCU | | CUCA | |
| miR-770-5p | UCCAGUACCACGUGUCA | 3735 | UGGCCCUGACACGUGGUA | 3736 |
| | GGGCCA | | CUGGA | |
| miR-802 | CAGUAACAAAGAUUCAU | 3737 | ACAAGGAUGAAUCUUUG | 3738 |
| | CCUUGU | | UUACUG | |
| miR-873-3p | GGAGACUGAUGAGUUCC | 3739 | UCCCGGGAACUCAUCAGU | 3740 |
| | CGGGA | | CUCC | |
| miR-873-5p | GCAGGAACUUGUGAGUC | 3741 | AGGAGACUCACAAGUUCC | 3742 |
| | UCCU | | UGC | |
| miR-874 | CUGCCCUGGCCCGAGGG | 3743 | UCGGUCCCUCGGGCCAGG | 3744 |
| | ACCGA | | GCAG | |
| miR-875-3p | CCUGGAAACACUGAGGU | 3745 | CACAACCUCAGUGUUUCC | 3746 |
| | UGUG | | AGG | |
| miR-875-5p | UAUACCUCAGUUUUAUC | 3747 | CACCUGAUAAAACUGAGG | 3748 |
| | AGGUG | | UAUA | |
| miR-876-3p | UGGUGGUUUACAAAGUA | 3749 | UGAAUUACUUUGUAAACC | 3750 |
| | AUUCA | | ACCA | |
| miR-876-5p | UGGAUUUCUUUGUGAAU | 3751 | UGGUGAUUCACAAAGAA | 3752 |
| | CACCA | | AUCCA | |
| miR-877-3p | UCCUCUUCUCCCUCCUCC | 3753 | CUGGGAGGAGGGAGAAG | 3754 |
| | CAG | | AGGA | |
| miR-877-5p | GUAGAGGAGAUGGCGCA | 3755 | CCCUGCGCCAUCUCCUCU | 3756 |
| | GGG | | AC | |
| miR-885-3p | AGGCAGCGGGGUGUAGU | 3757 | UAUCCACUACACCCCGCU | 3758 |
| | GGAUA | | GCCU | |
| miR-885-5p | UCCAUUACACUACCCUG | 3759 | AGAGGCAGGGUAGUGUA | 3760 |
| | CCUCU | | AUGGA | |
| miR-887 | GUGAACGGGCGCCAUCC | 3761 | CCUCGGGAUGGCGCCCGU | 3762 |
| | CGAGG | | UCAC | |
| miR-888-3p | GACUGACACCUCUUUGG | 3763 | UUCACCCAAAGAGGUGUC | 3764 |
| | GUGAA | | AGUC | |
| miR-888-5p | UACUCAAAAAGCUGUCA | 3765 | UGACUGACAGCUUUUUGA | 3766 |
| | GUCA | | GUA | |
| miR-889 | UUAAUAUCGGACAACCA | 3767 | ACAAUGGUUGUCCGAUAU | 3768 |
| | UUGU | | UAA | |
| miR-890 | UACUUGGAAAGGCAUCA | 3769 | CAACUGAUGCCUUUCCAA | 3770 |
| | GUUG | | GUA | |
| miR-891a | UGCAACGAACCUGAGCC | 3771 | UCAGUGGCUCAGGUUCGU | 3772 |
| | ACUGA | | UGCA | |
| miR-891b | UGCAACUUACCUGAGUC | 3773 | UCAAUGACUCAGGUAAGU | 3774 |
| | AUUGA | | UGCA | |
| miR-892a | CACUGUGUCCUUUCUGC | 3775 | CUACGCAGAAAGGACACA | 3776 |
| | GUAG | | GUG | |
| miR-892b | CACUGGCUCCUUUCUGG | 3777 | UCUACCCAGAAAGGAGCC | 3778 |
| | GUAGA | | AGUG | |
| miR-9-3p | AUAAAGCUAGAUAACCG | 3779 | ACUUUCGGUUAUCUAGCU | 3780 |
| | AAAGU | | UUAU | |
| miR-9-5p | UCUUUGGUUAUCUAGCU | 3781 | UCAUACAGCUAGAUAACC | 3782 |
| | GUAUGA | | AAAGA | |
| miR-920 | GGGGAGCUGUGGAAGCA | 3783 | UACUGCUUCCACAGCUCC | 3784 |
| | GUA | | CC | |
| miR-921 | CUAGUGAGGGACAGAAC | 3785 | GAAUCCUGGUUCUGUCCC | 3786 |
| | CAGGAUUC | | UCACUAG | |
| miR-922 | GCAGCAGAGAAUAGGAC | 3787 | GACGUAGUCCUAUUCUCU | 3788 |
| | UACGUC | | GCUGC | |
| miR-924 | AGAGUCUUGUGAUGUCU | 3789 | GCAAGACAUCACAAGACU | 3790 |
| | UGC | | CU | |
| miR-92a-1-5p | AGGUUGGGAUCGGUUGC | 3791 | AGCAUUGCAACCGAUCCC | 3792 |
| | AAUGCU | | AACCU | |
| miR-92a-2-5p | GGGUGGGGAUUUGUUGC | 3793 | GUAAUGCAACAAAUCCCC | 3794 |
| | AUUAC | | ACCC | |
| miR-92a-3p | UAUUGCACUUGUCCCGG | 3795 | ACAGGCCGGGACAAGUGC | 3796 |
| | CCUGU | | AAUA | |
| miR-92b-3p | UAUUGCACUCGUCCCGG | 3797 | GGAGGCCGGGACGAGUGC | 3798 |
| | CCUCC | | AAUA | |
| miR-92b-5p | AGGGACGGGACGCGGUG | 3799 | CACUGCACCGCGUCCCGU | 3800 |
| | CAGUG | | CCCU | |
| miR-93-3p | ACUGCUGAGCUAGCACU | 3801 | CGGGAAGUGCUAGCUCAG | 3802 |
| | UCCCG | | CAGU | |
| miR-93-5p | CAAAGUGCUGUUCGUGC | 3803 | CUACCUGCACGAACAGCA | 3804 |
| | AGGUAG | | CUUUG | |
| miR-933 | UGUGCGCAGGGAGACCU | 3805 | GGGAGAGGUCUCCCUGCG | 3806 |
| | CUCCC | | CACA | |
| miR-934 | UGUCUACUACUGGAGAC | 3807 | CCAGUGUCUCCAGUAGUA | 3808 |
| | ACUGG | | GACA | |
| miR-935 | CCAGUUACCGCUUCCGC | 3809 | GCGGUAGCGGAAGCGGUA | 3810 |
| | UACCGC | | ACUGG | |
| miR-936 | ACAGUAGAGGGAGGAAU | 3811 | CUGCGAUUCCUCCCUCUA | 3812 |
| | CGCAG | | CUGU | |
| miR-937 | AUCCGCGCUCUGACUCU | 3813 | GGCAGAGAGUCAGAGCGC | 3814 |
| | CUGCC | | GGAU | |
| miR-938 | UGCCCUUAAAGGUGAAC | 3815 | ACUGGGUUCACCUUUAAG | 3816 |
| | CCAGU | | GGCA | |
| miR-939 | UGGGGAGCUGAGGCUCU | 3817 | CACCCCCAGAGCCUCAGC | 3818 |
| | GGGGGUG | | UCCCCA | |
| miR-940 | AAGGCAGGGCCCCCGCU | 3819 | GGGGAGCGGGGGCCCUGC | 3820 |
| | CCCC | | CUU | |
| miR-941 | CACCCGGCUGUGUGCAC | 3821 | GCACAUGUGCACACAGCC | 3822 |
| | AUGUGC | | GGGUG | |
| miR-942 | UCUUCUCUGUUUUGGCC | 3823 | CACAUGGCCAAAACAGAG | 3824 |
| | AUGUG | | AAGA | |
| miR-943 | CUGACUGUUGCCGUCCU | 3825 | CUGGAGGACGGCAACAGU | 3826 |
| | CCAG | | CAG | |
| miR-944 | AAAUUAUUGUACAUCGG | 3827 | CUCAUCCGAUGUACAAUA | 3828 |
| | AUGAG | | AUUU | |
| miR-95 | UUCAACGGGUAUUUAUU | 3829 | UGCUCAAUAAAUACCCGU | 3830 |
| | GAGCA | | UGAA | |
| miR-96-3p | AAUCAUGUGCAGUGCCA | 3831 | CAUAUUGGCACUGCACAU | 3832 |
| | AUAUG | | GAUU | |
| miR-96-5p | UUUGGCACUAGCACAUU | 3833 | AGCAAAAAUGUGCUAGU | 3834 |
| | UUUGCU | | GCCAAA | |
| miR-98 | UGAGGUAGUAAGUUGUA | 3835 | AACAAUACAACUUACUAC | 3836 |
| | UUGUU | | CUCA | |
| miR-99a-3p | CAAGCUCGCUUCUAUGG | 3837 | CAGACCCAUAGAAGCGAG | 3838 |
| | GUCUG | | CUUG | |
| miR-99a-5p | AACCCGUAGAUCCGAUC | 3839 | CACAAGAUCGGAUCUACG | 3840 |
| | UUGUG | | GGUU | |
| miR-99b-3p | CAAGCUCGUGUCUGUGG | 3841 | CGGACCCACAGACACGAG | 3842 |
| | GUCCG | | CUUG | |
| miR-99b-5p | CACCCGUAGAACCGACC | 3843 | CGCAAGGUCGGUUCUACG | 3844 |
| | UUGCG | | GGUG | |

[0041] In some embodiments, miRNA seeds, which may be incorporated into viral target sequences to create a miRNA binding site are 2-8 nucleobases in length. One having ordinary skill in the art will appreciate that this embodies compounds of 2, 3, 4, 5, 6, 7 or 8 nucleobases in length, or any range therewithin.

[0042] miRNA binding sites may be engineered into a viral sequence based on tissue specificity. For example, sites may be created to encourage or facilitate the binding of miRNA found in neuronal cells or epithelial cells. Table 4 lists the sequence of miRNA found to be expressed in the brain. Sequences which comprise all or a portion of the reverse complement of these miRNA may be engineered into a viral target sequence to produce a vaccine of the present invention.

TABLE 4
miRNA in the brain

| | SEQ | | SEQ |
|---|---|---|---|
| 5′ to 3′ miRNA sequence | ID | Reverse Complement (miRNA site) | ID |
| AAGUUUCUCUGAAUGUGUAGA | 3845 | UCUACACAUUCAGAGAAACUU | 3846 |
| AAUAUACAGGGGGAGACUCUUAU | 3847 | AUAAGAGUCUCCCCCUGUAUAUU | 3848 |
| AAUCAUUCACGGACAACACUUU | 3849 | AAAGUGUUGUCCGUGAAUGAUU | 3850 |
| AAUCUGAGAAGGCGCACAAGGUU | 3851 | AAACCUUGUGCGCCUUCUCAGAU | 3852 |
| U | | U | |
| AAUGUGUAGCAAAAGACAGA | 3853 | UCUGUCUUUUGCUACACAUU | 3854 |
| AAUGUGUAGCAAAAGACAGAAU | 3855 | AUUCUGUCUUUUGCUACACAUU | 3856 |
| ACCUUGGCUCUAGACUGCUUACU | 3857 | AGUAAGCAGUCUAGAGCCAAGGU | 3858 |
| ACUGGACUUGGAGUCAGAAG | 3859 | CUUCUGACUCCAAGUCCAGU | 3860 |
| AGAGGUUUUCUGGGUUUCUGUUU | 3861 | AAACAGAAACCCAGAAAACCUCU | 3862 |
| AGGCAUUAGAUUCUCAUUAGGA | 3863 | UCCUAAUGAGAAUCUAAUGCCU | 3864 |
| AGGGACUUUUGGGGGCAGAUGUG | 3865 | ACACAUCUGCCCCCAAAAGUCCC | 3866 |
| U | | U | |
| AGUUGGUCCGAGUGUUGUGGGUU | 3867 | AAUAACCCACAACACUCGGACCA | 3868 |
| AUU | | ACU | |
| AUAGGACUCAUAUAGUGCCA | 3869 | UGGCACUAUAUGAGUCCUAU | 3870 |
| AUAUACAGGGGGAGACUCUUAU | 3871 | AUAAGAGUCUCCCCCUGUAUAU | 3872 |
| AUCAUACAAGGACAAUUUCUUU | 3873 | AAAGAAAUUGUCCUUGUAUGAU | 3874 |
| AUCCCCAGAUACAAUGGACAAU | 3875 | AUUGUCCAUUGUAUCUGGGGAU | 3876 |
| CAACAAAUCACAGCCGGCCUCA | 3877 | UGAGGCCGGCUGUGAUUUGUUG | 3878 |
| CAGGCAGUGACUGUUCAGACGUC | 3879 | GACGUCUGAACAGUCACUGCCUG | 3880 |
| CCCCCCACUGCUAAAUUUGACUG | 3881 | AAGCCAGUCAAAUUUAGCAGUGG | 3882 |
| GCUU | | GGGG | |
| CUGUGGUUCCUGUAUGAAGACA | 3883 | UGUCUUCAUACAGGAACCACAG | 3884 |
| GAGAGAUCAGAGGCGCAGAGU | 3885 | ACUCUGCGCCUCUGAUCUCUC | 3886 |
| GCAUUGGUGGUUCAGUGGUAGAA | 3887 | GAAUUCUACCACUGAACCACCAA | 3888 |
| UUC | | UGC | |
| GCGUUGGUGGUAUAGUGG | 3889 | CCACUAUACCACCAACGC | 3890 |
| GCUCUGACUUUAUUGCACUACU | 3891 | AGUAGUGCAAUAAAGUCAGAGC | 3892 |
| GGAGACUGAUGAGUUCCCGGGA | 3893 | UCCCGGGAACUCAUCAGUCUCC | 3894 |
| GGAGGAACCUUGGAGCUUCGGCA | 3895 | UGCCGAAGCUCCAAGGUUCCUCC | 3896 |
| GGGGGCCGAUACACUGUACGAGA | 3897 | UCUCGUACAGUGUAUCGGCCCCC | 3898 |
| GUAAUGGUUAGCACUCUGG | 3899 | CCAGAGUGCUAACCAUUAC | 3900 |
| GUCUCUGUGGCGCAAUCGGU | 3901 | ACCGAUUGCGCCACAGAGAC | 3902 |
| UGAGUCUGUAAGAAAAGAGGAG | 3903 | CUCCUCUUUUCUUACAGACUCA | 3904 |
| UGGGCUGUAGUGCGCUAUGCC | 3905 | GGCAUAGCGCACUACAGCCCA | 3906 |
| UGGGCUGUAGUGCGCUAUGCCGA | 3907 | AUCGGCAUAGCGCACUACAGCCC | 3908 |
| U | | A | |
| UGGUCGACCAGUUGGAAAGUAAU | 3909 | AUUACUUUCCAACUGGUCGACCA | 3910 |
| UGGUCGACCAGUUGGAAAGUAAU | 3911 | AUUACUUUCCAACUGGUCGACCA | 3912 |
| UGUAGGGAUGGAAGCCAUGA | 3913 | UCAUGGCUUCCAUCCCUACA | 3914 |
| UGUAGGGAUGGAAGCCAUGAAA | 3915 | UUUCAUGGCUUCCAUCCCUACA | 3916 |

[0043] In one embodiment the presence of the virus in cells or tissues may be determined by looking for a “signature” of the virus. This signature may then inform the location of the virus and hence inform the selection of a miRNA binding site of an endogenous miRNA known to be expressed in that cellular location. The cellular environment in which a virus is present or has been present may be identified by its miRNA signature such as is described in US Publication 2011/0151430 to Kowalik and Stadler, the contents of which are incorporated herein by reference in its entirety. In a further embodiment of this aspect, the miRNAs may include any of the miRNAs of the eukaryotic miRNome.

[0044] According to the present invention, miRNA which are present in certain cells, tissues or environments may provide the sequence upon which to base the incorporated miRNA site engineered into the viral target sequences of the invention. Certain miRNA are known to be found in particular tissues or cells and representative examples are listed in Table 5.

TABLE 5
miRNA expression location

Dendritic Cells
let-7i
miR-142-3p
miR-146a
miR-148
miR-155
miR-221
miR-222
miRNA in Brain
mir-128
mir-219
mir-124a
mir-9
mir-135
mir-153
mir-183
miRNA in retinal epithelial cells
let-7b
let-7a
mir-125b
mir-24
mir-320
mir-23b
let-7e
let-7d
mir-23a
let-7c

### Antibiotics

[0045] The present invention may also be exploited to produce vaccines against bacterial infections. To this end, bacterial genomes, genes or sequences may be engineered to contain one or more miRNA sites. In one embodiment, targeted bacteria include both Gram negative and Gram positive bacteria. Examples of Gram positive bacteria include, but are not limited to Pasteurella species, Staphylococci species, and Streptococcus species. Examples of Gram negative bacteria include, but are not limited to, Escherichia coli, Pseudomonas species, and Salmonella species. Specific examples of infectious bacteria include but are not limited to: Helicobacter pyloris, Borrelia burgdorferi, Legionella pneumophilia, Mycobacteria spp. (e.g., M. tuberculosis, M. avium, M. intracellulare, M. kansasii, M. gordonae, M. leprae), Staphylococcus aureus, Neisseria gonorrhoeae, Neisseria meningitidis, Listeria monocytogenes, Streptococcus pyogenes (Group A Streptococcus), Streptococcus agalactiae (Group B Streptococcus), Streptococcus (viridans group), Streptococcus faecalis, Streptococcus bovis, Streptococcus (anaerobic spp.), Streptococcus pneumoniae, pathogenic Campylobacter spp., Enterococcus spp., Haemophilus influenzae (Hemophilus influenza B, and Hemophilus influenza non-typable), Bacillus anthracis, Corynebacterium diphtheriae, Corynebacterium spp., Erysipelothrix rhusiopathiae, Clostridium perfringens, Clostridium tetani, Enterobacter aerogenes, Klebsiella pneumoniae, Pasturella multocida, Bacteroides spp., Fusobacterium nucleatum, Streptobacillus moniliformis, Treponema pallidum, Treponema pertenue, Leptospira, Rickettsia, Actinomyces israelii, meningococcus, pertussis, pneumococcus, shigella, tetanus, Vibrio cholerae, yersinia, Pseudomonas species, Clostridia species, Salmonella typhi, Shigella dysenteriae, Yersinia pestis, Brucella species, Legionella pneumophila, Rickettsiae, Chlamydia, Clostridium perfringens, Clostridium botulinum, Staphylococcus aureus, Pseudomonas aeruginosa, Cryptosporidium parvum, Streptococcus pneumoniae, and Bordetella pertussis.

### Amino Acid Based Vaccines

[0046] The vaccines of the present invention may also be polypeptide based molecules. In this embodiment, miRNA sites may be engineered into polynucleotides that encode one or more proteins from the pathogen. It is also within the scope of the invention for amino acid based vaccines to comprise one or more encoded proteins of the virus strain whereby no miRNA binding site is present. In this embodiment, replication would be a priori compromised as not all of the genes for replication would be present.

[0047] Chimeric nucleic acid/amino acid molecules are also contemplated such that the miRNA site is bound or linked to the polypeptide based vaccine. These molecules may be “peptides,” “polypeptides,” or “proteins.”

[0048] While it is known in the art that these terms imply relative size, these terms as used herein should not be considered limiting with respect to the size of the various polypeptide based molecules referred to herein and which are encompassed within this invention.

[0049] The terms “amino acid” and “amino acids” refer to all naturally occurring L-alpha-amino acids. The amino acids are identified by either the one-letter or three-letter designations as follows: aspartic acid (Asp:D), isoleucine (Ile:I), threonine (Thr:T), leucine (Leu:L), serine (Ser:S), tyrosine (Tyr:Y), glutamic acid (Glu:E), phenylalanine (Phe:F), proline (Pro:P), histidine (His:H), glycine (Gly:G), lysine (Lys:K), alanine (Ala:A), arginine (Arg:R), cysteine (Cys:C), tryptophan (Trp:W), valine (Val:V), glutamine (Gln:Q) methionine (Met:M), asparagines (Asn:N), where the amino acid is listed first followed parenthetically by the three and one letter codes, respectively.

[0050] The amino acid sequences of the vaccines of the invention may comprise naturally occurring amino acids and as such may be considered to be proteins, peptides, polypeptides, or fragments thereof. Alternatively, the vaccines may comprise both naturally and non-naturally occurring amino acids.

[0051] The term “amino acid sequence variant” refers to molecules with some differences in their amino acid sequences as compared to a native sequence. The amino acid sequence variants may possess substitutions, deletions, and/or insertions at certain positions within the amino acid sequence. Ordinarily, variants will possess at least about 70% homology to a native sequence, and preferably, they will be at least about 80%, more preferably at least about 90% homologous to a native sequence.

[0052] “Homology” as it applies to amino acid sequences is defined as the percentage of residues in the candidate amino acid sequence that are identical with the residues in the amino acid sequence of a second sequence after aligning the sequences and introducing gaps, if necessary, to achieve the maximum percent homology. Methods and computer programs for the alignment are well known in the art. It is understood that homology depends on a calculation of percent identity but may differ in value due to gaps and penalties introduced in the calculation.

[0053] By “homologs” as it applies to amino acid sequences is meant the corresponding sequence of other species having substantial identity to a second sequence of a second species.

[0054] “Analogs” is meant to include polypeptide variants which differ by one or more amino acid alterations, e.g., substitutions, additions or deletions of amino acid residues that still maintain the properties of the parent polypeptide.

[0055] The term “derivative” is used synonymously with the term “variant” and refers to a molecule that has been modified or changed in any way relative to a reference molecule or starting molecule.

[0056] The present invention contemplates several types of vaccines which are amino acid based including variants and derivatives. These include substitutional, insertional, deletion and covalent variants and derivatives. As such, included within the scope of this invention are polypeptide based molecules containing substitutions, insertions and/or additions, deletions and covalently modifications. For example, sequence tags or amino acids, such as one or more lysines, can be added to the peptide sequences of the invention (e.g., at the N-terminal or C-terminal ends). Sequence tags can be used for peptide purification or localization. Lysines can be used to increase peptide solubility or to allow for biotinylation. Alternatively, amino acid residues located at the carboxy and amino terminal regions of the amino acid sequence of a peptide or protein may optionally be deleted providing for truncated sequences. Certain amino acids (e.g., C-terminal or N-terminal residues) may alternatively be deleted depending on the use of the sequence, as for example, expression of the sequence as part of a larger sequence which is soluble, or linked to a solid support.

[0057] “Substitutional variants” when referring to proteins are those that have at least one amino acid residue in a native or starting sequence removed and a different amino acid inserted in its place at the same position. The substitutions may be single, where only one amino acid in the molecule has been substituted, or they may be multiple, where two or more amino acids have been substituted in the same molecule.

[0058] As used herein the term “conservative amino acid substitution” refers to the substitution of an amino acid that is normally present in the sequence with a different amino acid of similar size, charge, or polarity. Examples of conservative substitutions include the substitution of a non-polar (hydrophobic) residue such as isoleucine, valine and leucine for another non-polar residue. Likewise, examples of conservative substitutions include the substitution of one polar (hydrophilic) residue for another such as between arginine and lysine, between glutamine and asparagine, and between glycine and serine. Additionally, the substitution of a basic residue such as lysine, arginine or histidine for another, or the substitution of one acidic residue such as aspartic acid or glutamic acid for another acidic residue are additional examples of conservative substitutions. Examples of non-conservative substitutions include the substitution of a non-polar (hydrophobic) amino acid residue such as isoleucine, valine, leucine, alanine, methionine for a polar (hydrophilic) residue such as cysteine, glutamine, glutamic acid or lysine and/or a polar residue for a non-polar residue.

[0059] “Insertional variants” when referring to proteins are those with one or more amino acids inserted immediately adjacent to an amino acid at a particular position in a native or starting sequence. “Immediately adjacent” to an amino acid means connected to either the alpha-carboxy or alpha-amino functional group of the amino acid.

[0060] “Deletional variants” when referring to proteins are those with one or more amino acids in the native or starting amino acid sequence removed. Ordinarily, deletional variants will have one or more amino acids deleted in a particular region of the molecule.

[0061] “Covalent derivatives” when referring to proteins include modifications of a native or starting protein with an organic proteinaceous or non-proteinaceous derivatizing agent, and post-translational modifications. Covalent modifications are traditionally introduced by reacting targeted amino acid residues of the protein with an organic derivatizing agent that is capable of reacting with selected side-chains or terminal residues, or by harnessing mechanisms of post-translational modifications that function in selected recombinant host cells. The resultant covalent derivatives are useful in programs directed at identifying residues important for biological activity, for immunoassays, or for the preparation of anti-protein antibodies for immunoaffinity purification of the recombinant glycoprotein. Such modifications are within the ordinary skill in the art and are performed without undue experimentation.

[0062] Certain post-translational modifications are the result of the action of recombinant host cells on the expressed polypeptide. Glutaminyl and asparaginyl residues are frequently post-translationally deamidated to the corresponding glutamyl and aspartyl residues. Alternatively, these residues are deamidated under mildly acidic conditions. Either form of these residues may be present in the proteins used in accordance with the present invention.

[0063] Other post-translational modifications include hydroxylation of proline and lysine, phosphorylation of hydroxyl groups of seryl or threonyl residues, methylation of the .alpha.-amino groups of lysine, arginine, and histidine side chains (T. E. Creighton, Proteins: Structure and Molecular Properties, W.H. Freeman & Co., San Francisco, pp. 79-86 (1983).

[0064] Covalent derivatives specifically include fusion molecules in which proteins of the invention are covalently bonded to a non-proteinaceous polymer. The non-proteinaceous polymer ordinarily is a hydrophilic synthetic polymer, i.e. a polymer not otherwise found in nature. However, polymers which exist in nature and are produced by recombinant or in vitro methods are useful, as are polymers which are isolated from nature. Hydrophilic polyvinyl polymers fall within the scope of this invention, e.g. polyvinylalcohol and polyvinylpyrrolidone. Particularly useful are polyvinylalkylene ethers such a polyethylene glycol, polypropylene glycol. The proteins may be linked to various non-proteinaceous polymers, such as polyethylene glycol, polypropylene glycol or polyoxyalkylenes, in the manner set forth in U.S. Pat. No. 4,640,835; 4,496,689; 4,301,144; 4,670,417; 4,791,192 or 4,179,337.

[0065] “Features” when referring to proteins are defined as distinct amino acid sequence-based components of a molecule. Features of the proteins of the present invention include surface manifestations, local conformational shape, folds, loops, half-loops, domains, half-domains, sites, termini or any combination thereof.

[0066] As used herein when referring to proteins the term “surface manifestation” refers to a polypeptide based component of a protein appearing on an outermost surface.

[0067] As used herein when referring to proteins the term “local conformational shape” means a polypeptide based structural manifestation of a protein which is located within a definable space of the protein.

[0068] As used herein when referring to proteins the term “fold” means the resultant conformation of an amino acid sequence upon energy minimization. A fold may occur at the secondary or tertiary level of the folding process. Examples of secondary level folds include beta sheets and alpha helices. Examples of tertiary folds include domains and regions formed due to aggregation or separation of energetic forces. Regions formed in this way include hydrophobic and hydrophilic pockets, and the like.

[0069] As used herein the term “turn” as it relates to protein conformation means a bend which alters the direction of the backbone of a peptide or polypeptide and may involve one, two, three or more amino acid residues.

[0070] As used herein when referring to proteins the term “loop” refers to a structural feature of a peptide or polypeptide which reverses the direction of the backbone of a peptide or polypeptide and comprises four or more amino acid residues. Oliva et al. have identified at least 5 classes of protein loops (J. Mol. Biol 266 (4): 814-830; 1997).

[0071] As used herein when referring to proteins the term “half-loop” refers to a portion of an identified loop having at least half the number of amino acid resides as the loop from which it is derived. It is understood that loops may not always contain an even number of amino acid residues. Therefore, in those cases where a loop contains or is identified to comprise an odd number of amino acids, a half-loop of the odd-numbered loop will comprise the whole number portion or next whole number portion of the loop (number of amino acids of the loop/2+/-0.5 amino acids). For example, a loop identified as a 7 amino acid loop could produce half-loops of 3 amino acids or 4 amino acids (7/2=3.5+/-0.5 being 3 or 4).

[0072] As used herein when referring to proteins the term “domain” refers to a motif of a polypeptide having one or more identifiable structural or functional characteristics or properties (e.g., binding capacity, serving as a site for protein-protein interactions.

[0073] As used herein when referring to proteins the term “half-domain” means portion of an identified domain having at least half the number of amino acid resides as the domain from which it is derived. It is understood that domains may not always contain an even number of amino acid residues. Therefore, in those cases where a domain contains or is identified to comprise an odd number of amino acids, a half-domain of the odd-numbered domain will comprise the whole number portion or next whole number portion of the domain (number of amino acids of the domain/2+/-0.5 amino acids). For example, a domain identified as a 7 amino acid domain could produce half-domains of 3 amino acids or 4 amino acids (7/2=3.5+/−0.5 being 3 or 4). It is also understood that sub-domains may be identified within domains or half-domains, these subdomains possessing less than all of the structural or functional properties identified in the domains or half domains from which they were derived. It is also understood that the amino acids that comprise any of the domain types herein need not be contiguous along the backbone of the polypeptide (i.e., nonadjacent amino acids may fold structurally to produce a domain, half-domain or subdomain).

[0074] As used herein when referring to proteins the terms “site” as it pertains to amino acid based embodiments is used synonymous with “amino acid residue” and “amino acid side chain.” A site represents a position within a peptide or polypeptide that may be modified, manipulated, altered, derivatized or varied within the polypeptide based molecules of the present invention.

[0075] As used herein the terms “termini or terminus” when referring to proteins refers to an extremity of a peptide or polypeptide. Such extremity is not limited only to the first or final site of the peptide or polypeptide but may include additional amino acids in the terminal regions. The polypeptide based molecules of the present invention may be characterized as having both an N-terminus (terminated by an amino acid with a free amino group (NH2)) and a C-terminus (terminated by an amino acid with a free carboxyl group (COOH)). Proteins of the invention are in some cases made up of multiple polypeptide chains brought together by disulfide bonds or by non-covalent forces (multimers, oligomers). These sorts of proteins will have multiple N- and C-termini. Alternatively, the termini of the polypeptides may be modified such that they begin or end, as the case may be, with a non-polypeptide based moiety such as an organic conjugate.

[0076] Once any of the features have been identified or defined as a component of a molecule of the invention, any of several manipulations and/or modifications of these features may be performed by moving, swapping, inverting, deleting, randomizing or duplicating. Furthermore, it is understood that manipulation of features may result in the same outcome as a modification to the molecules of the invention. For example, a manipulation which involved deleting a domain would result in the alteration of the length of a molecule just as modification of a nucleic acid to encode less than a full length molecule would.

[0077] Modifications and manipulations can be accomplished by methods known in the art such as site directed mutagenesis. The resulting modified molecules may then be tested for activity using in vitro or in vivo assays such as those described herein or any other suitable screening assay known in the art.

### Delivery of Vaccines

[0078] The delivery of a vaccine to a subject in need thereof can be achieved in a number of different ways. In vivo delivery can be performed directly by administering a composition comprising a vaccine to a subject. Alternatively, delivery can be performed indirectly by administering one or more vectors that encode and direct the expression of the vaccine. These alternatives are discussed further below.

[0079] “Introducing into a cell,” when referring to a vaccine, means facilitating or effecting uptake or absorption into the cell, as is understood by those skilled in the art. Absorption or uptake of a vaccine can occur through unaided diffusive or active cellular processes, or by auxiliary agents or devices. The meaning of this term is not limited to cells in vitro; a vaccine may also be “introduced into a cell,” wherein the cell is part of a living organism. In such an instance, introduction into the cell will include the delivery to the organism. For example, for in vivo delivery, vaccines can be injected into a tissue site or administered systemically or intranasally. It is also contemplated by the inventors that introduction into cells or tissues may effected ex vivo, in situ and in ovo. In the case of transplants or within the field of stem cell technologies, it is contemplated that “introduction into a cell” will embrace the introduction to cells of any lineage or state, whether presently stem cells or which are intended to produce stem cells or progenitors or precursors thereof, as well as tissues, explants, organs and even organ systems.

### Direct Delivery

[0080] In general, any method of delivering a nucleic acid molecule can be adapted for use with a vaccine (see e.g., Akhtar S, and Julian R L. (1992) Trends Cell. Biol. 2(5):139-144 and WO94/02595, which are incorporated herein by reference in their entireties). However, there are three factors that are important to consider in order to successfully deliver a vaccine molecule in vivo: (a) biological stability of the delivered molecule, (2) preventing non-specific effects, and (3) accumulation of the delivered molecule in the target tissue. The non-specific effects of a vaccine can be minimized by local administration, for example by direct injection or implantation into a tissue (as a non-limiting example, a tumor) or topically administering the preparation.

[0081] For administering a vaccine systemically for the treatment of a disease, the vaccine can be modified or alternatively delivered using a drug delivery system; both methods act to prevent the rapid degradation of the molecule by endo- and exo-nucleases (in the case of nucleic acid based vaccines) in vivo. Modification of the RNA component of a vaccine or the pharmaceutical carrier can also permit targeting of the vaccine composition to the target tissue and avoid undesirable off-target effects. Vaccines modified by chemical conjugation to lipophilic groups such as cholesterol to enhance cellular uptake and prevent degradation. In like fashion, the vaccines of the present invention may be conjugated to one or more aptamers.

[0082] In an alternative embodiment, the vaccine can be delivered using drug delivery systems such as a nanoparticle, a dendrimer, a polymer, liposomes, or a cationic delivery system. Positively charged cationic delivery systems facilitate binding of a vaccine molecule (when negatively charged) and also enhance interactions at the negatively charged cell membrane to permit efficient uptake of a vaccine by the cell. Cationic lipids, dendrimers, or polymers can either be bound to a vaccine, or induced to form a vesicle or micelle that encases a vaccine. The formation of vesicles or micelles further prevents degradation of the vaccine when administered systemically. Methods for making and administering cationic-vaccine complexes are well within the abilities of one skilled in the art (see e.g., Sorensen, DR., et al (2003) J. Mol. Biol. 327:761-766; Verma, UN., et al (2003) Clin. Cancer Res. 9:1291-1300; Arnold, A S et al (2007) J. Hypertens. 25:197-205, which are incorporated herein by reference in their entirety). Some non-limiting examples of drug delivery systems useful for systemic delivery of vaccines include DOTAP (Sorensen, DR., et al (2003), supra; Verma, U N., et al (2003), supra), Oligofectamine, “solid nucleic acid lipid particles” (Zimmermann, T S., et al (2006) Nature 441:111-114), cardiolipin (Chien, P Y., et al (2005) Cancer Gene Ther. 12:321-328; Pal, A., et al (2005) Int J. Oncol. 26:1087-1091), polyethyleneimine (Bonnet M E., et al (2008) Pharm. Res. Aug 16 Epub ahead of print; Aigner, A. (2006) J. Biomed. Biotechnol. 71659), Arg-Gly-Asp (RGD) peptides (Liu, S. (2006) Mol. Pharm. 3:472-487), and polyamidoamines (Tomalia, D A., et al (2007) Biochem. Soc. Trans. 35:61-67; Yoo, H., et al (1999) Pharm. Res. 16:1799-1804). In some embodiments, a vaccine forms a complex with cyclodextrin for systemic administration.

### Vector Encoded Vaccines

[0083] In another aspect, vaccines can be expressed from transcription units inserted into DNA or RNA vectors. Expression can be transient (on the order of hours to weeks) or sustained (weeks to months or longer), depending upon the specific construct used and the target tissue or cell type. These transgenes can be introduced as a linear construct, a circular plasmid, or a viral vector, which can be an integrating or non-integrating vector. The transgene can also be constructed to permit it to be inherited as an extrachromosomal plasmid (Gassmann, et al., Proc. Natl. Acad. Sci. USA (1995) 92:1292).

[0084] Expression vectors are generally DNA plasmids or viral vectors. Expression vectors compatible with eukaryotic cells, preferably those compatible with vertebrate cells, can be used to produce recombinant constructs for the expression of a vaccine as described herein. Eukaryotic cell expression vectors are well known in the art and are available from a number of commercial sources. Typically, such vectors are provided containing convenient restriction sites for insertion of the desired nucleic acid segment.

[0085] Delivery of vaccine expressing vectors can be systemic, such as by intravenous or intramuscular administration, by administration to target cells ex-planted from the patient followed by reintroduction into the patient, or by any other means that allows for introduction into a desired target cell.

[0086] Vaccine expression plasmids can be transfected into target cells as a complex with cationic lipid carriers (e.g., Oligofectamine) or non-cationic lipid-based carriers (e.g., Transit-TKO™). Successful introduction of vectors into host cells can be monitored using various known methods. For example, transient transfection can be signaled with a reporter, such as a fluorescent marker, such as Green Fluorescent Protein (GFP). Stable transfection of cells ex vivo can be ensured using markers that provide the transfected cell with resistance to specific environmental factors (e.g., antibiotics and drugs), such as hygromycin B resistance.

[0087] Viral vector systems which can be utilized with the methods and compositions described herein include, but are not limited to, (a) adenovirus vectors; (b) retrovirus vectors, including but not limited to lentiviral vectors, moloney murine leukemia virus, etc.; (c) adeno-associated virus vectors; (d) herpes simplex virus vectors; (e) SV 40 vectors; (f) polyoma virus vectors; (g) papilloma virus vectors; (h) picornavirus vectors; (i) pox virus vectors such as an orthopox, e.g., vaccinia virus vectors or avipox, e.g. canary pox or fowl pox; and (j) a helper-dependent or gutless adenovirus. Replication-defective viruses can also be advantageous. Different vectors will or will not become incorporated into the cells' genome. The constructs can include viral sequences for transfection, if desired. Alternatively, the construct may be incorporated into vectors capable of episomal replication, e.g EPV and EBV vectors. Constructs for the recombinant expression of a vaccine will generally require regulatory elements, e.g., promoters, enhancers, etc., to ensure the expression of the vaccine in target cells. Other aspects to consider for vectors and constructs are further described below.

[0088] Vectors useful for the delivery of a vaccine may include regulatory elements (promoter, enhancer, etc.) sufficient for expression of the vaccine in the desired target cell or tissue. The regulatory elements can be chosen to provide either constitutive or regulated/inducible expression.

[0089] Expression of the vaccine can be precisely regulated, for example, by using an inducible regulatory sequence that is sensitive to certain physiological regulators, e.g., circulating glucose levels, or hormones (Docherty et al., 1994, FASEB J. 8:20-24). Such inducible expression systems, suitable for the control of expression in cells or in mammals include, for example, regulation by ecdysone, by estrogen, progesterone, tetracycline, chemical inducers of dimerization, and isopropyl-beta-D1-thiogalactopyranoside (IPTG). A person skilled in the art would be able to choose the appropriate regulatory/promoter sequence based on the intended use of the transgene.

[0090] In a specific embodiment, viral vectors that contain nucleic acid sequences encoding a vaccine can be used. For example, a retroviral vector can be used (see Miller et al., Meth. Enzymol. 217:581-599 (1993)). These retroviral vectors contain the components necessary for the correct packaging of the viral genome and integration into the host cell DNA. The nucleic acid sequences encoding a vaccine are cloned into one or more vectors, which facilitates delivery of the nucleic acid into a cell, tissue or patient. More detail about retroviral vectors can be found, for example, in Boesen et al., Biotherapy 6:291-302 (1994), which describes the use of a retroviral vector to deliver the mdr1 gene to hematopoietic stem cells in order to make the stem cells more resistant to chemotherapy.

[0091] In one embodiment, the vaccines of the present invention may be delivered via a bacterial delivery approach as disclosed in PCT Publication WO/2008/156702, the contents of which are incorporated herein in its entirety.

[0092] Adenoviruses are also contemplated for use in delivery of nucleic acid based vaccines. Adenoviruses are especially attractive vehicles, e.g., for delivering genes to respiratory epithelia. Adenoviruses naturally infect respiratory epithelia where they cause a mild disease. Other targets for adenovirus-based delivery systems are liver, the central nervous system, endothelial cells, and muscle. Adenoviruses have the advantage of being capable of infecting non-dividing cells. Kozarsky and Wilson, Current Opinion in Genetics and Development 3:499-503 (1993) present a review of adenovirus-based gene therapy. Bout et al., Human Gene Therapy 5:3-10 (1994) demonstrated the use of adenovirus vectors to transfer genes to the respiratory epithelia of rhesus monkeys.

[0093] A suitable AV vector for expressing a vaccine featured in the invention, a method for constructing the recombinant AV vector, and a method for delivering the vector into target cells, are described in Xia H et al. (2002), Nat. Biotech. 20: 1006-1010. Use of Adeno-associated virus (AAV) vectors is also contemplated (Walsh et al., Proc. Soc. Exp. Biol. Med. 204:289-300 (1993); U.S. Pat. No. 5,436,146).

[0094] In one embodiment, the vaccine can be expressed as two separate, complementary single-stranded RNA molecules from a recombinant AAV vector having, for example, either the U6 or H1 RNA promoters, or the cytomegalovirus (CMV) promoter. Suitable AAV vectors for expressing the vaccines featured in the invention, methods for constructing the recombinant AV vector, and methods for delivering the vectors into target cells are described in Samulski R et al. (1987), J. Virol. 61: 3096-3101; Fisher K J et al. (1996), J. Virol, 70: 520-532; Samulski R et al. (1989), J. Virol. 63: 3822-3826; U.S. Pat. No. 5,252,479; U.S. Pat. No. 5,139,941; International Patent Application No. WO 94/13788; and International Patent Application No. WO 93/24641, the entire disclosures of which are herein incorporated by reference.

[0095] Another preferred viral vector is a pox virus such as a vaccinia virus, for example an attenuated vaccinia such as Modified Virus Ankara (MVA) or NYVAC, an avipox such as fowl pox or canary pox.

[0096] The tropism of viral vectors can be modified by pseudotyping the vectors with envelope proteins or other surface antigens from other viruses, or by substituting different viral capsid proteins, as appropriate. For example, lentiviral vectors can be pseudotyped with surface proteins from vesicular stomatitis virus (VSV), rabies, Ebola, Mokola, and the like. AAV vectors can be made to target different cells by engineering the vectors to express different capsid protein serotypes; see, e.g., Rabinowitz J E et al. (2002), J Virol 76:791-801, the entire disclosure of which is herein incorporated by reference.

[0097] The pharmaceutical preparation of a vector can include the vector in an acceptable diluent or can include a slow release matrix in which the gene delivery vehicle is imbedded. Alternatively, where the complete gene delivery vector can be produced intact from recombinant cells, e.g., retroviral vectors, the pharmaceutical preparation can include one or more cells which produce the gene delivery system.

### Formulations

[0098] In one embodiment, a vaccine featured in the invention is fully encapsulated in a lipid formulation, e.g., to form a SPLP, pSPLP, SNALP, or other nucleic acid-lipid particle. As used herein, the term “SNALP” refers to a stable nucleic acid-lipid particle, including SPLP. SNALPs are described, e.g., in U.S. Patent Application Publication Nos. 20060240093, 20070135372, and in International Application No. WO 2009082817. These applications are incorporated herein by reference in their entirety. In one embodiment, lipids and/or lipid-containing compositions or formulations described herein are used as adjuvants when delivered with the vaccines of the present invention. As used herein, an “adjuvant” is any agent that modifies the effect of another agent. In the present case, the lipids or lipid-based formulations may function to alter the effect of the vaccine on the subject, e.g., improving the immune response elicited.

[0099] As used herein, the term “SPLP” refers to a nucleic acid-lipid particle comprising plasmid DNA encapsulated within a lipid vesicle. SNALPs and SPLPs typically contain a cationic lipid, a non-cationic lipid, and a lipid that prevents aggregation of the particle (e.g., a PEG-lipid conjugate). SNALPs and SPLPs are extremely useful for systemic applications, as they exhibit extended circulation lifetimes following intravenous (i.v.) injection and accumulate at distal sites (e.g., sites physically separated from the administration site). SPLPs include “pSPLP,” which include an encapsulated condensing agent-nucleic acid complex as set forth in PCT Publication No. WO 00/03683. The particles of the present invention typically have a mean diameter of about 50 nm to about 150 nm, more typically about 60 nm to about 130 nm, more typically about 70 nm to about 110 nm, most typically about 70 nm to about 90 nm, and are substantially nontoxic. In addition, the nucleic acids when present in the nucleic acid-lipid particles of the present invention are resistant in aqueous solution to degradation with a nuclease. Nucleic acid-lipid particles and their method of preparation are disclosed in, e.g., U.S. Pat. Nos. 5,976,567; 5,981,501; 6,534,484; 6,586,410; 6,815,432; and PCT Publication No. WO 96/40964, each of which is incorporated herein by reference in its entirety.

[0100] In one embodiment, the lipid to drug ratio (mass/mass ratio) (e.g., lipid to vaccine ratio) will be in the range of from about 1:1 to about 50:1, from about 1:1 to about 25:1, from about 3:1 to about 15:1, from about 4:1 to about 10:1, from about 5:1 to about 9:1, or about 6:1 to about 9:1.

[0101] The cationic lipid may be, for example, N,N-dioleyl-N,N-dimethylammonium chloride (DODAC), N,N-distearyl-N,N-dimethylammonium bromide (DDAB), N-(1-(2,3-dioleoyloxy)propyl)-N,N,N-trimethylammonium chloride (DOTAP), N-(1-(2,3-dioleyloxy)propyl)-N,N,N-trimethylammonium chloride (DOTMA), N,N-dimethyl-2,3-dioleyloxy)propylamine (DODMA), 1,2-DiLinoleyloxy-N,N-dimethylaminopropane (DLinDMA),1,2-Dilinolenyloxy-N,N-dimethylaminopropane (DLenDMA), 1,2-Dilinoleylcarbamoyloxy-3-dimethylaminopropane (DLin-C-DAP), 1,2-Dilinoleyoxy-3-(dimethylamino)acetoxypropane (DLin-DAC), 1,2-Dilinoleyoxy-3-morpholinopropane (DLin-MA), 1,2-Dilinoleoyl-3-dimethylaminopropane (DLinDAP), 1,2-Dilinoleylthio-3-dimethylaminopropane (DLin-S-DMA), 1-Linoleoyl-2-linoleyloxy-3-dimethylaminopropane (DLin-2-DMAP), 1,2-Dilinoleyloxy-3-trimethylaminopropane chloride salt (DLin-TMA.Cl), 1,2-Dilinoleoyl-3-trimethylaminopropane chloride salt (DLin-TAP.Cl), 1,2-Dilinoleyloxy-3-(N-methylpiperazino)propane (DLin-MPZ), or 3-(N,N-Dilinoleylamino)-1,2-propanediol (DLinAP), 3-(N,N-Dioleylamino)-1,2-propanedio (DOAP), 1,2-Dilinoleyloxo-3-(2-N,N-dimethylamino)ethoxypropane (DLin-EG-DMA),1,2-Dilinolenyloxy-N,N-dimethylaminopropane (DLinDMA), 2,2-Dilinoleyl-4-dimethylaminomethyl-[1,3]-dioxolane (DLin-K-DMA) or analogs thereof, (3aR,5s,6aS)—N,N-dimethyl-2,2-di((9Z,12Z)-octadeca-9,12-dienyl)tetrahydro-3aH-cyclopenta[d][1,3]dioxol-5-amine (ALN100), (6Z,9Z,28Z,31Z)-heptatriaconta-6,9,28,31-tetraen-19-yl-4-(dimethylamino)butanoate (MC3), 1,1′-(2-(4-(2-((2-(bis(2-hydroxydodecyl)amino)ethyl)(2-hydroxydodecyl)amino)ethyl)piperazin-1-yl)ethylazanediyl)didodecan-2-ol (Tech G1), or a mixture thereof. The cationic lipid may comprise from about 20 mol % to about 50 mol % or about 40 mol % of the total lipid present in the particle.

[0102] In another embodiment, the compound 2,2-Dilinoleyl-4-dimethylaminoethyl-[1,3]-dioxolane can be used to prepare lipid nanoparticles. Synthesis of 2,2-Dilinoleyl-4-dimethylaminoethyl-[1,3]-dioxolane is described in U.S. provisional patent application No. 61/107,998 filed on Oct. 23, 2008, which is herein incorporated by reference.

[0103] In one embodiment, the particle includes 40% 2,2-Dilinoleyl-4-dimethylaminoethyl-[1,3]-dioxolane:10% DSPC:40% Cholesterol:10% PEG-C-DOMG (mole percent) with a particle size of 63.0±20 nm.

[0104] The non-cationic lipid may be an anionic lipid or a neutral lipid including, but not limited to, distearoylphosphatidylcholine (DSPC), dioleoylphosphatidylcholine (DOPC), dipalmitoylphosphatidylcholine (DPPC), dioleoylphosphatidylglycerol (DOPG), dipalmitoylphosphatidylglycerol (DPPG), dioleoyl-phosphatidylethanolamine (DOPE), palmitoyloleoylphosphatidylcholine (POPC), palmitoyloleoylphosphatidylethanolamine (POPE), dioleoyl-phosphatidylethanolamine 4-(N-maleimidomethyl)-cyclohexane-1-carboxylate (DOPE-mal), dipalmitoyl phosphatidyl ethanolamine (DPPE), dimyristoylphosphoethanolamine (DMPE), distearoyl-phosphatidyl-ethanolamine (DSPE),16-O-monomethyl PE, 16-O-dimethyl PE, 18-1-trans PE, 1-stearoyl-2-oleoyl-phosphatidyethanolamine (SOPE), cholesterol, or a mixture thereof. The non-cationic lipid may be from about 5 mol % to about 90 mol %, about 10 mol %, or about 58 mol % if cholesterol is included, of the total lipid present in the particle.

[0105] The conjugated lipid that inhibits aggregation of particles may be, for example, a polyethyleneglycol (PEG)-lipid including, without limitation, a PEG-diacylglycerol (DAG), a PEG-dialkyloxypropyl (DAA), a PEG-phospholipid, a PEG-ceramide (Cer), or a mixture thereof. The PEG-DAA conjugate may be, for example, a PEG-dilauryloxypropyl (Ci₂), a PEG-dimyristyloxypropyl (Ci₄), a PEG-dipalmityloxypropyl (Ci₆), or a PEG-distearyloxypropyl (C]₈). The conjugated lipid that prevents aggregation of particles may be from 0 mol % to about 20 mol % or about 2 mol % of the total lipid present in the particle.

[0106] In some embodiments, the nucleic acid-lipid particle further includes cholesterol at, e.g., about 10 mol % to about 60 mol % or about 48 mol % of the total lipid present in the particle.

[0107] In one embodiment, the lipidoid ND98•4HCl (MW 1487) (see U.S. patent application Ser. No. 12/056,230, filed Mar. 26, 2008, which is herein incorporated by reference), Cholesterol (Sigma-Aldrich), and PEG-Ceramide C16 (Avanti Polar Lipids) can be used to prepare nanoparticles (i.e., LNP01 particles). Stock solutions of each in ethanol can be prepared as follows: ND98, 133 mg/ml; Cholesterol, 25 mg/ml, PEG-Ceramide C16, 100 mg/ml. The ND98, Cholesterol, and PEG-Ceramide C16 stock solutions can then be combined in a, e.g., 42:48:10 molar ratio. Depending on the desired particle size distribution, the resultant nanoparticle mixture can be extruded through a polycarbonate membrane (e.g., 100 nm cut-off) using, for example, a thermobarrel extruder, such as Lipex Extruder (Northern Lipids, Inc). In some cases, the extrusion step can be omitted. Ethanol removal and simultaneous buffer exchange can be accomplished by, for example, dialysis or tangential flow filtration. Buffer can be exchanged with, for example, phosphate buffered saline (PBS) at about pH 7, e.g., about pH 6.9, about pH 7.0, about pH 7.1, about pH 7.2, about pH 7.3, or about pH 7.4. LNP01 formulations are described, e.g., in International Application Publication No. WO 2008/042973, which is hereby incorporated by reference. Additional exemplary lipid formulations are shown in Table 6.

TABLE 6
Lipid Nanoparticle formulations

| | | cationic lipid/non-cationic |
|---|---|---|
| | | lipid/cholesterol/PEG-lipid conjugate |
| | | Lipid:nucleic acid (e.g., nucleic acid or |
| | Cationic Lipid | vaccine) ratio |
| SNALP | l,2-Dilinolenyloxy-N,N- | DLinDMA/DPPC/Cholesterol/PEG-cDMA |
| | dimethylaminopropane | (57.1/7.1/34.4/1.4) |
| | (DLinDMA) | lipid:vaccine ~7:1 |
| S-XTC | 2,2-Dilinoleyl-4- | XTC/DPPC/Cholesterol/PEG-cDMA |
| | dimethylaminoethyl-[1,3]- | 57.1/7.1/34.4/1.4 |
| | dioxolane (XTC) | lipid:vaccine ~7:1 |
| LNP05 | 2,2-Dilinoleyl-4- | XTC/DSPC/Cholesterol/PEG-DMG |
| | dimethylaminoethyl-[1,3]- | 57.5/7.5/31.5/3.5 |
| | dioxolane (XTC) | lipid:vaccine ~6:1 |
| LNP06 | 2,2-Dilinoleyl-4- | XTC/DSPC/Cholesterol/PEG-DMG |
| | dimethylaminoethyl-[1,3]- | 57.5/7.5/31.5/3.5 |
| | dioxolane (XTC) | lipid:vaccine ~11:1 |
| LNP07 | 2,2-Dilinoleyl-4- | XTC/DSPC/Cholesterol/PEG-DMG |
| | dimethylaminoethyl-[1,3]- | 60/7.5/31/1.5, |
| | dioxolane (XTC) | lipid:vaccine ~6:1 |
| LNP08 | 2,2-Dilinoleyl-4- | XTC/DSPC/Cholesterol/PEG-DMG |
| | dimethylaminoethyl-[1,3]- | 60/7.5/31/1.5, |
| | dioxolane (XTC) | lipid:vaccine ~11:1 |
| LNP09 | 2,2-Dilinoleyl-4- | XTC/DSPC/Cholesterol/PEG-DMG |
| | dimethylaminoethyl-[1,3]- | 50/10/38.5/1.5 |
| | dioxolane (XTC) | Lipid:vaccine 10:1 |
| LNP10 | (3aR,5s,6aS)-N,N- | ALN100/DSPC/Cholesterol/PEG-DMG |
| | dimethyl-2,2-di((9Z,12Z)- | 50/10/38.5/1.5 |
| | octadeca-9,12- | Lipid:vaccine 10:1 |
| | dienyl)tetrahydro-3aH- | |
| | cyclopenta[d][1,3]dioxol- | |
| | 5-amine (ALN100) | |
| LNP11 | (6Z,9Z,28Z,31Z)- | MC-3/DSPC/Cholesterol/PEG-DMG |
| | heptatriaconta-6,9,28,31- | 50/10/38.5/1.5 |
| | tetraen-19-yl 4- | Lipid:vaccine 10:1 |
| | (dimethylamino)butanoate | |
| | (MC3) | |
| LNP12 | 1,1′-(2-(4-(2-((2-(bis(2- | C12-200/DSPC/Cholesterol/PEG-DMG |
| | hydroxydodecyl)amino)ethyl)(2- | 50/10/38.5/1.5 |
| | hydroxydodecyl)amino)ethyl) | Lipid:vaccine 10:1 |
| | piperazin-1- | |
| | yl)ethylazanediyl)didodecan- | |
| | 2-ol (C12-200) | |
| LNP13 | XTC | XTC/DSPC/Chol/PEG-DMG |
| | | 50/10/38.5/1.5 |
| | | Lipid:vaccine: 33:1 |
| LNP14 | MC3 | MC3/DSPC/Chol/PEG-DMG |
| | | 40/15/40/5 |
| | | Lipid:vaccine: 11:1 |
| LNP15 | MC3 | MC3/DSPC/Chol/PEG-DSG/GalNAc-PEG-DSG |
| | | 50/10/35/4.5/0.5 |
| | | Lipid:vaccine: 11:1 |
| LNP16 | MC3 | MC3/DSPC/Chol/PEG-DMG |
| | | 50/10/38.5/1.5 |
| | | Lipid:vaccine: 7:1 |
| LNP17 | MC3 | MC3/DSPC/Chol/PEG-DSG |
| | | 50/10/38.5/1.5 |
| | | Lipid:vaccine: 10:1 |
| LNP18 | MC3 | MC3/DSPC/Chol/PEG-DMG |
| | | 50/10/38.5/1.5 |
| | | Lipid:vaccine: 12:1 |
| LNP19 | MC3 | MC3/DSPC/Chol/PEG-DMG |
| | | 50/10/35/5 |
| | | Lipid:vaccine: 8:1 |
| LNP20 | MC3 | MC3/DSPC/Chol/PEG-DPG |
| | | 50/10/38.5/1.5 |
| | | Lipid:vaccine: 10:1 |
| LNP21 | C12-200 | C12-200/DSPC/Chol/PEG-DSG |
| | | 50/10/38.5/1.5 |
| | | Lipid:vaccine: 7:1 |
| LNP22 | XTC | XTC/DSPC/Chol/PEG-DSG |
| | | 50/10/38.5/1.5 |
| | | Lipid:vaccine: 10:1 |

[0108] DSPC: distearoylphosphatidylcholine

[0109] DPPC: dipalmitoylphosphatidylcholine

[0110] PEG-DMG: PEG-didimyristoyl glycerol (C14-PEG, or PEG-C14) (PEG with avg mol wt of 2000)

[0111] PEG-DSG: PEG-distyryl glycerol (C18-PEG, or PEG-C18) (PEG with avg mol wt of 2000)

[0112] PEG-cDMA: PEG-carbamoyl-1,2-dimyristyloxypropylamine (PEG with avg mol wt of 2000)

[0113] SNALP (1,2-Dilinolenyloxy-N,N-dimethylaminopropane (DLinDMA)) comprising formulations are described in International Publication No. WO2009/127060, filed Apr. 15, 2009, which is hereby incorporated by reference in its entirety.

[0114] XTC comprising formulations are described, e.g., in U.S. Provisional Ser. No. 61/239,686, filed Sep. 3, 2009 as well as PCT/US10/22614 filed Jan. 29, 2010 each of which is hereby incorporated by reference in its entirety. Further XTC formulations useful in the present invention are disclosed in PCT/US08/088,588 filed 31 Dec. 2008 and PCT/US08/88587 filed 31 Dec. 2008 and PCT/US09/041,442 filed 22 Apr. 2009 and PCT/US09/061,897 filed 23 Oct. 2009 and PCT/US10/38224 filed Jun. 10, 2010, each of which is hereby incorporated by reference in its entirety.

[0115] MC3 comprising formulations are described, e.g., in U.S. Provisional Ser. No. 61/244,834, filed Sep. 22, 2009, and U.S. Provisional Ser. No. 61/185,800, filed Jun. 10, 2009, and PCT/US09/63933 filed Nov. 10, 2009 and PCT/US09/63927 filed 10 Nov. 2009 and PCT/US09/63931 filed 10 Nov. 2009 and PCT/US09/63897 filed 10 Nov. 2009, each of which are hereby incorporated by reference in its entirety.

[0116] ALNY-100 comprising formulations are described, e.g., International patent application number PCT/US09/63933, filed on Nov. 10, 2009, which is hereby incorporated by reference in its entirety.

[0117] C12-200 comprising formulations are described in U.S. Provisional Ser. No. 61/175,770, filed May 5, 2009, as well as PCT/US10/33777 which are hereby incorporated by reference in its entirety.

[0118] Transfection reagents useful in the present invention are disclosed in U.S. provisional 61/267,419 filed Dec. 7, 2009, which is hereby incorporated by reference in its entirety.

[0119] Formulations for targeting immune cells useful in the present invention are disclosed in PCT/US10/033,747 filed May 5, 2010, which is hereby incorporated by reference in its entirety.

[0120] Pyrrolidine cationic lipids useful in the formulations of the present invention are disclosed in U.S. Ser. No. 12/123,922 filed May 20, 2008 which is hereby incorporated by reference in its entirety.

[0121] In one embodiment, the reagent that facilitates targeting construct uptake used herein comprises a cationic lipid as described in e.g., U.S. Application Ser. No. 61/267,419, filed 7 Dec. 2009, and U.S. Application Ser. No. 61/334,398, filed 13 May 2010. In various embodiments, the composition described herein comprises a cationic lipid selected from the group consisting of: “Lipid H”, “Lipid K”; “Lipid L”, “Lipid M”; “Lipid P”; or “Lipid R”, whose formulas are indicated as follows:

[chemical structure]

[0122] Also contemplated herein are various formulations of the lipids described above, such as, e.g., K8, P8 and L8 which refer to formulations comprising Lipid K, P, and L, respectively. Some exemplary lipid formulations for use with the methods and compositions described herein are found in Table 7.

TABLE 7
Example lipid formulations

| Formulation | Cationic Lipid | Cationic Lipid | DOPE | Cholesterol |
|---|---|---|---|---|
| Number | Number | Mol % | % | % |
| 1 | 200 (Lipid H) | 48.08 | 51.92 | — |
| 2 | 200 (Lipid H) | 47.94 | 47.06 | 5 |
| 3 | 201 (Lipid K) | 45.56 | 54.44 | — |
| 4 (K8) | 201 (Lipid K) | 47.94 | 47.06 | 5 |
| 5 (L8) | 202 (Lipid L) | 47.94 | 47.06 | 5 |
| 6 | 203 (Lipid M) | 53.01 | 44.49 | 2.5 |
| 7 | 203 (Lipid M) | 47.94 | 47.06 | 5 |
| 8 (P8) | 204 (Lipid P) | 47.94 | 47.06 | 5 |
| 9 | 205 (Lipid R) | 47.94 | 47.06 | 5 |

[0123] In another embodiment, the composition described herein further comprises a lipid formulation comprising a lipid selected from the group consisting of Lipid H, Lipid K, Lipid L, Lipid M, Lipid P, and Lipid R, and further comprises a neutral lipid and a sterol. In particular embodiments, the lipid formulation comprises between approximately 25 mol %-100 mol % of the lipid. In another embodiment, the lipid formulation comprises between 0 mol %-50 mol % cholesterol. In still another embodiment, the lipid formulation comprises between 30 mol %-65 mol % of a neutral lipid. In particular embodiments, the lipid formulation comprises the relative mol % of the components as listed in Table 8 as follows:

TABLE 8
Example lipid formulae

| Series | Lipid (Mol %) | DOPE | Chol |
|---|---|---|---|
| 1 | 45.56 | 54.44 | 0 |
| 2 | 48.08 | 51.92 | 0 |
| 3 | 50.60 | 49.40 | 0 |
| 4 | 53.10 | 46.90 | 0 |
| 5 | 52.73 | 37.27 | 10 |
| 6 | 52.92 | 42.08 | 5 |
| 7 | 53.01 | 44.49 | 2.5 |
| 8 | 47.94 | 47.06 | 5 |

### Other Particles

[0124] In vivo delivery can also be by a beta-glucan delivery system, such as those described in U.S. Pat. Nos. 5,032,401 and 5,607,677, and U.S. Publication No. 2005/0281781, which are hereby incorporated by reference in their entirety. In vitro introduction into a cell includes methods known in the art such as electroporation and lipofection.

[0125] In one embodiment, core-shell nanoparticles may be used for delivery to cells, tissues or organ systems. Such core-shell nanoparticles are described by Siegwart (Siegwart, et al., Combinatorial synthesis of chemically diverse core-shell nanoparticles for intracellular delivery, PNAS, PNAS Early edition, Jul. 22, 2011; the contents of which are incorporated herein in their entirety) and comprise a cationic core to facilitate vaccine complexation, with variation in the nature of the protonizable amine, and a shell with variation in polymer length and chemical properties. Block copolymers created by reacting epoxide groups with amines and possessing poly(oligo(ethylene oxide) methacrylate) (POEOMA) with different lengths of the PEO side chain, may increase blood circulation time due to the PEO shell of the resulting nanoparticle. Anionic, cationic, zwitterionic, and hydrophobic blocks may also be used as shells.

### Liposomal Formulations

[0126] There are many organized surfactant structures that have been studied and used for the formulation of drugs. These include monolayers, micelles, bilayers and vesicles. Vesicles, such as liposomes, have attracted great interest because of their specificity and the duration of action they offer from the standpoint of drug delivery. As used in the present invention, the term “liposome” means a vesicle composed of amphiphilic lipids arranged in a spherical bilayer or bilayers.

[0127] Liposomes are unilamellar or multilamellar vesicles which have a membrane formed from a lipophilic material and an aqueous interior. The aqueous portion contains the composition to be delivered. Cationic liposomes possess the advantage of being able to fuse to the cell wall. Non-cationic liposomes, although not able to fuse as efficiently with the cell wall, are taken up by macrophages in vivo.

[0128] In order to traverse intact mammalian skin, lipid vesicles must pass through a series of fine pores, each with a diameter less than 50 nm, under the influence of a suitable transdermal gradient. Therefore, it is desirable to use a liposome which is highly deformable and able to pass through such fine pores.

[0129] Further advantages of liposomes include; liposomes obtained from natural phospholipids are biocompatible and biodegradable; liposomes can incorporate a wide range of water and lipid soluble drugs; liposomes can protect encapsulated drugs in their internal compartments from metabolism and degradation (Rosoff, in Pharmaceutical Dosage Forms, Lieberman, Rieger and Banker (Eds.), 1988, Marcel Dekker, Inc., New York, N.Y., volume 1, p. 245). Important considerations in the preparation of liposome formulations are the lipid surface charge, vesicle size and the aqueous volume of the liposomes.

[0130] Liposomes are useful for the transfer and delivery of active ingredients to the site of action. Because the liposomal membrane is structurally similar to biological membranes, when liposomes are applied to a tissue, the liposomes start to merge with the cellular membranes and as the merging of the liposome and cell progresses, the liposomal contents are emptied into the cell where the active agent may act.

[0131] Liposomal formulations have been the focus of extensive investigation as the mode of delivery for many drugs. There is growing evidence that for topical administration, liposomes present several advantages over other formulations. Such advantages include reduced side-effects related to high systemic absorption of the administered drug, increased accumulation of the administered drug at the desired target, and the ability to administer a wide variety of drugs, both hydrophilic and hydrophobic, into the skin.

[0132] Several reports have detailed the ability of liposomes to deliver agents including high-molecular weight DNA into the skin. Compounds including analgesics, antibodies, hormones and high-molecular weight DNAs have been administered to the skin. The majority of applications resulted in the targeting of the upper epidermis.

[0133] Liposomes fall into two broad classes. Cationic liposomes are positively charged liposomes which interact with the negatively charged DNA molecules to form a stable complex. The positively charged DNA/liposome complex binds to the negatively charged cell surface and is internalized in an endosome. Due to the acidic pH within the endosome, the liposomes are ruptured, releasing their contents into the cell cytoplasm (Wang et al., Biochem. Biophys. Res. Commun., 1987, 147, 980-985).

[0134] Liposomes which are pH-sensitive or negatively charged entrap DNA rather than complex with it. Since both the DNA and the lipid are similarly charged, repulsion rather than complex formation occurs. Nevertheless, some DNA is entrapped within the aqueous interior of these liposomes. pH-sensitive liposomes have been used to deliver DNA encoding the thymidine kinase gene to cell monolayers in culture. Expression of the exogenous gene was detected in the target cells (Zhou et al., Journal of Controlled Release, 1992, 19, 269-274).

[0135] One major type of liposomal composition includes phospholipids other than naturally-derived phosphatidylcholine. Neutral liposome compositions, for example, can be formed from dimyristoyl phosphatidylcholine (DMPC) or dipalmitoyl phosphatidylcholine (DPPC). Anionic liposome compositions generally are formed from dimyristoyl phosphatidylglycerol, while anionic fusogenic liposomes are formed primarily from dioleoyl phosphatidylethanolamine (DOPE). Another type of liposomal composition is formed from phosphatidylcholine (PC) such as, for example, soybean PC, and egg PC. Another type is formed from mixtures of phospholipid and/or phosphatidylcholine and/or cholesterol.

[0136] Several studies have assessed the topical delivery of liposomal drug formulations to the skin. Application of liposomes containing interferon to guinea pig skin resulted in a reduction of skin herpes sores while delivery of interferon via other means (e.g., as a solution or as an emulsion) were ineffective (Weiner et al., Journal of Drug Targeting, 1992, 2, 405-410). Further, an additional study tested the efficacy of interferon administered as part of a liposomal formulation to the administration of interferon using an aqueous system, and concluded that the liposomal formulation was superior to aqueous administration (du Plessis et al., Antiviral Research, 1992, 18, 259-265).

[0137] Non-ionic liposomal systems have also been examined to determine their utility in the delivery of drugs to the skin, in particular systems comprising non-ionic surfactant and cholesterol. Non-ionic liposomal formulations comprising Novasome™ I (glyceryl dilaurate/cholesterol/polyoxyethylene-10-stearyl ether) and Novasome™ II (glyceryl distearate/cholesterol/polyoxyethylene-10-stearyl ether) were used to deliver cyclosporin-A into the dermis of mouse skin. Results indicated that such non-ionic liposomal systems were effective in facilitating the deposition of cyclosporin-A into different layers of the skin (Hu et al. S.T.P.Pharma. Sci., 1994, 4, 6, 466).

[0138] Liposomes also include “sterically stabilized” liposomes, a term which, as used herein, refers to liposomes comprising one or more specialized lipids that, when incorporated into liposomes, result in enhanced circulation lifetimes relative to liposomes lacking such specialized lipids. Examples of sterically stabilized liposomes are those in which part of the vesicle-forming lipid portion of the liposome (A) comprises one or more glycolipids, such as monosialoganglioside G_{M1}, or (B) is derivatized with one or more hydrophilic polymers, such as a polyethylene glycol (PEG) moiety. While not wishing to be bound by any particular theory, it is thought in the art that, at least for sterically stabilized liposomes containing gangliosides, sphingomyelin, or PEG-derivatized lipids, the enhanced circulation half-life of these sterically stabilized liposomes derives from a reduced uptake into cells of the reticuloendothelial system (RES) (Allen et al., FEBS Letters, 1987, 223, 42; Wu et al., Cancer Research, 1993, 53, 3765).

[0139] Various liposomes comprising one or more glycolipids are known in the art. Papahadjopoulos et al. (Ann. N.Y. Acad. Sci., 1987, 507, 64) reported the ability of monosialoganglioside G_{M1}, galactocerebroside sulfate and phosphatidylinositol to improve blood half-lives of liposomes. These findings were expounded upon by Gabizon et al. (Proc. Natl. Acad. Sci. U.S.A., 1988, 85, 6949). U.S. Pat. No. 4,837,028 and WO 88/04924, both to Allen et al., disclose liposomes comprising (1) sphingomyelin and (2) the ganglioside G_{M1} or a galactocerebroside sulfate ester. U.S. Pat. No. 5,543,152 (Webb et al.) discloses liposomes comprising sphingomyelin. Liposomes comprising 1,2-sn-dimyristoylphosphatidylcholine are disclosed in WO 97/13499 (Lim et al).

[0140] Many liposomes comprising lipids derivatized with one or more hydrophilic polymers, and methods of preparation thereof, are known in the art. Sunamoto et al. (Bull. Chem. Soc. Jpn., 1980, 53, 2778) described liposomes comprising a nonionic detergent, 2C1215G, that contains a PEG moiety. Illum et al. (FEBS Lett., 1984, 167, 79) noted that hydrophilic coating of polystyrene particles with polymeric glycols results in significantly enhanced blood half-lives. Synthetic phospholipids modified by the attachment of carboxylic groups of polyalkylene glycols (e.g., PEG) are described by Sears (U.S. Pat. Nos. 4,426,330 and 4,534,899). Klibanov et al. (FEBS Lett., 1990, 268, 235) described experiments demonstrating that liposomes comprising phosphatidylethanolamine (PE) derivatized with PEG or PEG stearate have significant increases in blood circulation half-lives. Blume et al. (Biochimica et Biophysica Acta, 1990, 1029, 91) extended such observations to other PEG-derivatized phospholipids, e.g., DSPE-PEG, formed from the combination of distearoylphosphatidylethanolamine (DSPE) and PEG. Liposomes having covalently bound PEG moieties on their external surface are described in European Patent No. EP 0 445 131 B1 and WO 90/04384 to Fisher. Liposome compositions containing 1-20 mole percent of PE derivatized with PEG, and methods of use thereof, are described by Woodle et al. (U.S. Pat. Nos. 5,013,556 and 5,356,633) and Martin et al. (U.S. Pat. No. 5,213,804 and European Patent No. EP 0 496 813 B1). Liposomes comprising a number of other lipid-polymer conjugates are disclosed in WO 91/05545 and U.S. Pat. No. 5,225,212 (both to Martin et al.) and in WO 94/20073 (Zalipsky et al.) Liposomes comprising PEG-modified ceramide lipids are described in WO 96/10391 (Choi et al). U.S. Pat. No. 5,540,935 (Miyazaki et al.) and U.S. Pat. No. 5,556,948 (Tagawa et al.) describe PEG-containing liposomes that can be further derivatized with functional moieties on their surfaces.

[0141] Transfersomes are yet another type of liposomes, and are highly deformable lipid aggregates which are attractive candidates for drug delivery vehicles. Transfersomes may be described as lipid droplets which are so highly deformable that they are easily able to penetrate through pores which are smaller than the droplet. Transfersomes are adaptable to the environment in which they are used, e.g., they are self-optimizing (adaptive to the shape of pores in the skin), self-repairing, frequently reach their targets without fragmenting, and often self-loading. To make transfersomes it is possible to add surface edge-activators, usually surfactants, to a standard liposomal composition. Transfersomes have been used to deliver serum albumin to the skin. The transfersome-mediated delivery of serum albumin has been shown to be as effective as subcutaneous injection of a solution containing serum albumin.

[0142] Surfactants find wide application in formulations such as emulsions (including microemulsions) and liposomes. The most common way of classifying and ranking the properties of the many different types of surfactants, both natural and synthetic, is by the use of the hydrophile/lipophile balance (HLB). The nature of the hydrophilic group (also known as the “head”) provides the most useful means for categorizing the different surfactants used in formulations (Rieger, in Pharmaceutical Dosage Forms, Marcel Dekker, Inc., New York, N.Y., 1988, p. 285).

[0143] If the surfactant molecule is not ionized, it is classified as a nonionic surfactant. Nonionic surfactants find wide application in pharmaceutical and cosmetic products and are usable over a wide range of pH values. In general their HLB values range from 2 to about 18 depending on their structure. Nonionic surfactants include nonionic esters such as ethylene glycol esters, propylene glycol esters, glyceryl esters, polyglyceryl esters, sorbitan esters, sucrose esters, and ethoxylated esters. Nonionic alkanolamides and ethers such as fatty alcohol ethoxylates, propoxylated alcohols, and ethoxylated/propoxylated block polymers are also included in this class. The polyoxyethylene surfactants are the most popular members of the nonionic surfactant class.

[0144] If the surfactant molecule carries a negative charge when it is dissolved or dispersed in water, the surfactant is classified as anionic. Anionic surfactants include carboxylates such as soaps, acyl lactylates, acyl amides of amino acids, esters of sulfuric acid such as alkyl sulfates and ethoxylated alkyl sulfates, sulfonates such as alkyl benzene sulfonates, acyl isethionates, acyl taurates and sulfosuccinates, and phosphates. The most important members of the anionic surfactant class are the alkyl sulfates and the soaps.

[0145] If the surfactant molecule carries a positive charge when it is dissolved or dispersed in water, the surfactant is classified as cationic. Cationic surfactants include quaternary ammonium salts and ethoxylated amines. The quaternary ammonium salts are the most used members of this class.

[0146] If the surfactant molecule has the ability to carry either a positive or negative charge, the surfactant is classified as amphoteric. Amphoteric surfactants include acrylic acid derivatives, substituted alkylamides, N-alkylbetaines and phosphatides.

[0147] The use of surfactants in drug products, formulations and in emulsions has been reviewed (Rieger, in Pharmaceutical Dosage Forms, Marcel Dekker, Inc., New York, N.Y., 1988, p. 285).

[0148] Compositions and formulations for parenteral, intraparenchymal (into the brain), intrathecal, intraventricular or intrahepatic administration may include sterile aqueous solutions which may also contain buffers, diluents and other suitable additives such as, but not limited to, penetration enhancers, carrier compounds and other pharmaceutically acceptable carriers or excipients.

[0149] Pharmaceutical compositions of the present invention include, but are not limited to, solutions, emulsions, and liposome-containing formulations of vaccines. These compositions may be generated from a variety of components that include, but are not limited to, preformed liquids, self-emulsifying solids and self-emulsifying semisolids. Particularly preferred are formulations that target the liver when treating hepatic disorders such as hepatic carcinoma.

[0150] The pharmaceutical formulations of the present invention, which may conveniently be presented in unit dosage form, may be prepared according to conventional techniques well known in the pharmaceutical industry. Such techniques include the step of bringing into association the active ingredients with the pharmaceutical carrier(s) or excipient(s). In general, the formulations are prepared by uniformly and intimately bringing into association the active ingredients with liquid carriers or finely divided solid carriers or both, and then, if necessary, shaping the product.

[0151] The compositions of the present invention may be formulated into any of many possible dosage forms such as, but not limited to, tablets, capsules, gel capsules, liquid syrups, soft gels, suppositories, and enemas. The compositions of the present invention may also be formulated as suspensions in aqueous, non-aqueous or mixed media. Aqueous suspensions may further contain substances which increase the viscosity of the suspension including, for example, sodium carboxymethylcellulose, sorbitol and/or dextran. The suspension may also contain stabilizers.

### Emulsions

[0152] The compositions of the present invention may be prepared and formulated as emulsions. Emulsions are typically heterogeneous systems of one liquid dispersed in another in the form of droplets usually exceeding 0.1 um in diameter (see e.g., Ansel's Pharmaceutical Dosage Forms and Drug Delivery Systems, Allen, L V., Popovich N G., and Ansel H C., 2004, Lippincott Williams & Wilkins (8th ed.), New York, N.Y.; Idson, in Pharmaceutical Dosage Forms, Lieberman, Rieger and Banker (Eds.), 1988, Marcel Dekker, Inc., New York, N.Y., volume 1, p. 199; Rosoff, in Pharmaceutical Dosage Forms, Lieberman, Rieger and Banker (Eds.), 1988, Marcel Dekker, Inc., New York, N.Y., Volume 1, p. 245; Block in Pharmaceutical Dosage Forms, Lieberman, Rieger and Banker (Eds.), 1988, Marcel Dekker, Inc., New York, N.Y., volume 2, p. 335; Higuchi et al., in Remington's Pharmaceutical Sciences, Mack Publishing Co., Easton, Pa., 1985, p. 301). Other means of stabilizing emulsions entail the use of emulsifiers that may be incorporated into either phase of the emulsion. Emulsifiers may broadly be classified into four categories: synthetic surfactants, naturally occurring emulsifiers, absorption bases, and finely dispersed solids (see e.g., Ansel's Pharmaceutical Dosage Forms and Drug Delivery Systems, Allen, L V., Popovich N G., and Ansel H C., 2004, Lippincott Williams & Wilkins (8th ed.), New York, N.Y.; Idson, in Pharmaceutical Dosage Forms, Lieberman, Rieger and Banker (Eds.), 1988, Marcel Dekker, Inc., New York, N.Y., volume 1, p. 199).

[0153] Synthetic surfactants, also known as surface active agents, have found wide applicability in the formulation of emulsions and have been reviewed in the literature (see e.g., Ansel's Pharmaceutical Dosage Forms and Drug Delivery Systems, Allen, L V., Popovich N G., and Ansel H C., 2004, Lippincott Williams & Wilkins (8th ed.), New York, N.Y.; Rieger, in Pharmaceutical Dosage Forms, Lieberman, Rieger and Banker (Eds.), 1988, Marcel Dekker, Inc., New York, N.Y., volume 1, p. 285; Idson, in Pharmaceutical Dosage Forms, Lieberman, Rieger and Banker (Eds.), Marcel Dekker, Inc., New York, N.Y., 1988, volume 1, p. 199). Surfactants may be classified into different classes based on the nature of the hydrophilic group: nonionic, anionic, cationic and amphoteric (see e.g., Ansel's Pharmaceutical Dosage Forms and Drug Delivery Systems, Allen, L V., Popovich N G., and Ansel H C., 2004, Lippincott Williams & Wilkins (8th ed.), New York, N.Y. Rieger, in Pharmaceutical Dosage Forms, Lieberman, Rieger and Banker (Eds.), 1988, Marcel Dekker, Inc., New York, N.Y., volume 1, p. 285).

[0154] A large variety of non-emulsifying materials are also included in emulsion formulations and contribute to the properties of emulsions. These include fats, oils, waxes, fatty acids, fatty alcohols, fatty esters, humectants, hydrophilic colloids, preservatives and antioxidants (Block, in Pharmaceutical Dosage Forms, Lieberman, Rieger and Banker (Eds.), 1988, Marcel Dekker, Inc., New York, N.Y., volume 1, p. 335; Idson, in Pharmaceutical Dosage Forms, Lieberman, Rieger and Banker (Eds.), 1988, Marcel Dekker, Inc., New York, N.Y., volume 1, p. 199).

[0155] Hydrophilic colloids or hydrocolloids include naturally occurring gums and synthetic polymers such as polysaccharides (for example, acacia, agar, alginic acid, carrageenan, guar gum, karaya gum, and tragacanth), cellulose derivatives (for example, carboxymethylcellulose and carboxypropylcellulose), and synthetic polymers (for example, carbomers, cellulose ethers, and carboxyvinyl polymers). These disperse or swell in water to form colloidal solutions that stabilize emulsions by forming strong interfacial films around the dispersed-phase droplets and by increasing the viscosity of the external phase.

[0156] Since emulsions often contain a number of ingredients such as carbohydrates, proteins, sterols and phosphatides that may readily support the growth of microbes, these formulations often incorporate preservatives. Commonly used preservatives included in emulsion formulations include methyl paraben, propyl paraben, quaternary ammonium salts, benzalkonium chloride, esters of p-hydroxybenzoic acid, and boric acid. Antioxidants are also commonly added to emulsion formulations to prevent deterioration of the formulation. Antioxidants used may be free radical scavengers such as tocopherols, alkyl gallates, butylated hydroxyanisole, butylated hydroxytoluene, or reducing agents such as ascorbic acid and sodium metabisulfite, and antioxidant synergists such as citric acid, tartaric acid, and lecithin.

[0157] The application of emulsion formulations via dermatological, oral and parenteral routes and methods for their manufacture have been reviewed in the literature (see e.g., Ansel's Pharmaceutical Dosage Forms and Drug Delivery Systems, Allen, L V., Popovich N G., and Ansel H C., 2004, Lippincott Williams & Wilkins (8th ed.), New York, N.Y.; Idson, in Pharmaceutical Dosage Forms, Lieberman, Rieger and Banker (Eds.), 1988, Marcel Dekker, Inc., New York, N.Y., volume 1, p. 199). Emulsion formulations for oral delivery have been very widely used because of ease of formulation, as well as efficacy from an absorption and bioavailability standpoint (see e.g., Ansel's Pharmaceutical Dosage Forms and Drug Delivery Systems, Allen, L V., Popovich N G., and Ansel H C., 2004, Lippincott Williams & Wilkins (8th ed.), New York, N.Y.; Rosoff, in Pharmaceutical Dosage Forms, Lieberman, Rieger and Banker (Eds.), 1988, Marcel Dekker, Inc., New York, N.Y., volume 1, p. 245; Idson, in Pharmaceutical Dosage Forms, Lieberman, Rieger and Banker (Eds.), 1988, Marcel Dekker, Inc., New York, N.Y., volume 1, p. 199). Mineral-oil base laxatives, oil-soluble vitamins and high fat nutritive preparations are among the materials that have commonly been administered orally as o/w emulsions.

[0158] In one embodiment of the present invention, the compositions of vaccines are formulated as microemulsions. A microemulsion may be defined as a system of water, oil and amphiphile which is a single optically isotropic and thermodynamically stable liquid solution (see e.g., Ansel's Pharmaceutical Dosage Forms and Drug Delivery Systems, Allen, L V., Popovich N G., and Ansel H C., 2004, Lippincott Williams & Wilkins (8th ed.), New York, N.Y.; Rosoff, in Pharmaceutical Dosage Forms, Lieberman, Rieger and Banker (Eds.), 1988, Marcel Dekker, Inc., New York, N.Y., volume 1, p. 245). Microemulsions commonly are prepared via a combination of three to five components that include oil, water, surfactant, cosurfactant and electrolyte. Whether the microemulsion is of the water-in-oil (w/o) or an oil-in-water (o/w) type is dependent on the properties of the oil and surfactant used and on the structure and geometric packing of the polar heads and hydrocarbon tails of the surfactant molecules (Schott, in Remington's Pharmaceutical Sciences, Mack Publishing Co., Easton, Pa., 1985, p. 271).

[0159] The phenomenological approach utilizing phase diagrams has been extensively studied and has yielded a comprehensive knowledge, to one skilled in the art, of how to formulate microemulsions (see e.g., Ansel's Pharmaceutical Dosage Forms and Drug Delivery Systems, Allen, L V., Popovich N G., and Ansel H C., 2004, Lippincott Williams & Wilkins (8th ed.), New York, N.Y.; Rosoff, in Pharmaceutical Dosage Forms, Lieberman, Rieger and Banker (Eds.), 1988, Marcel Dekker, Inc., New York, N.Y., volume 1, p. 245; Block, in Pharmaceutical Dosage Forms, Lieberman, Rieger and Banker (Eds.), 1988, Marcel Dekker, Inc., New York, N.Y., volume 1, p. 335). Compared to conventional emulsions, microemulsions offer the advantage of solubilizing water-insoluble drugs in a formulation of thermodynamically stable droplets that are formed spontaneously.

[0160] Surfactants used in the preparation of microemulsions include, but are not limited to, ionic surfactants, non-ionic surfactants, Brij 96, polyoxyethylene oleyl ethers, polyglycerol fatty acid esters, tetraglycerol monolaurate (ML310), tetraglycerol monooleate (MO310), hexaglycerol monooleate (PO310), hexaglycerol pentaoleate (PO500), decaglycerol monocaprate (MCA750), decaglycerol monooleate (MO750), decaglycerol sequioleate (SO750), decaglycerol decaoleate (DA0750), alone or in combination with cosurfactants. The cosurfactant, usually a short-chain alcohol such as ethanol, 1-propanol, and 1-butanol, serves to increase the interfacial fluidity by penetrating into the surfactant film and consequently creating a disordered film because of the void space generated among surfactant molecules. Microemulsions may, however, be prepared without the use of cosurfactants and alcohol-free self-emulsifying microemulsion systems are known in the art. The aqueous phase may typically be, but is not limited to, water, an aqueous solution of the drug, glycerol, PEG300, PEG400, polyglycerols, propylene glycols, and derivatives of ethylene glycol. The oil phase may include, but is not limited to, materials such as Captex 300, Captex 355, Capmul MCM, fatty acid esters, medium chain (C8-C12) mono, di, and tri-glycerides, polyoxyethylated glyceryl fatty acid esters, fatty alcohols, polyglycolized glycerides, saturated polyglycolized C8-C10 glycerides, vegetable oils and silicone oil.

[0161] Microemulsions are particularly of interest from the standpoint of drug solubilization and the enhanced absorption of drugs. Lipid based microemulsions (both o/w and w/o) have been proposed to enhance the oral bioavailability of drugs, including peptides (see e.g., U.S. Pat. Nos. 6,191,105; 7,063,860; 7,070,802; 7,157,099; Constantinides et al., Pharmaceutical Research, 1994, 11, 1385-1390; Ritschel, Meth. Find. Exp. Clin. Pharmacol., 1993, 13, 205). Microemulsions afford advantages of improved drug solubilization, protection of drug from enzymatic hydrolysis, possible enhancement of drug absorption due to surfactant-induced alterations in membrane fluidity and permeability, ease of preparation, ease of oral administration over solid dosage forms, improved clinical potency, and decreased toxicity (see e.g., U.S. Pat. Nos. 6,191,105; 7,063,860; 7,070,802; 7,157,099; Constantinides et al., Pharmaceutical Research, 1994, 11, 1385; Ho et al., J. Pharm. Sci., 1996, 85, 138-143). Often microemulsions may form spontaneously when their components are brought together at ambient temperature. This may be particularly advantageous when formulating thermolabile vaccine drugs, or peptides. Microemulsions have also been effective in the transdermal delivery of active components in both cosmetic and pharmaceutical applications. It is expected that the microemulsion compositions and formulations of the present invention will facilitate the increased systemic absorption of nucleic acid based vaccines from the gastrointestinal tract, as well as improve the local cellular uptake.

[0162] Microemulsions of the present invention may also contain additional components and additives such as sorbitan monostearate (Grill 3), Labrasol, and penetration enhancers to improve the properties of the formulation and to enhance the absorption of the vaccines and nucleic acids of the present invention. Penetration enhancers used in the microemulsions of the present invention may be classified as belonging to one of five broad categories—surfactants, fatty acids, bile salts, chelating agents, and non-chelating non-surfactants (Lee et al., Critical Reviews in Therapeutic Drug Carrier Systems, 1991, p. 92). Each of these classes has been discussed above.

### Penetration Enhancers

[0163] In one embodiment, the present invention employs various penetration enhancers to effect the efficient delivery of vaccines to the skin of animals. Most drugs are present in solution in both ionized and nonionized forms. However, usually only lipid soluble or lipophilic drugs readily cross cell membranes. It has been discovered that even non-lipophilic drugs may cross cell membranes if the membrane to be crossed is treated with a penetration enhancer. In addition to aiding the diffusion of non-lipophilic drugs across cell membranes, penetration enhancers also enhance the permeability of lipophilic drugs.

[0164] Penetration enhancers may be classified as belonging to one of five broad categories, i.e., surfactants, fatty acids, bile salts, chelating agents, and non-chelating non-surfactants (see e.g., Malmsten, M. Surfactants and polymers in drug delivery, Informa Health Care, New York, N.Y., 2002; Lee et al., Critical Reviews in Therapeutic Drug Carrier Systems, 1991, p. 92). Each of the above mentioned classes of penetration enhancers are described below in greater detail.

[0165] Surfactants: In connection with the present invention, surfactants (or “surface-active agents”) are chemical entities which, when dissolved in an aqueous solution, reduce the surface tension of the solution or the interfacial tension between the aqueous solution and another liquid, with the result that absorption of vaccines through the mucosa is enhanced. In addition to bile salts and fatty acids, these penetration enhancers include, for example, sodium lauryl sulfate, polyoxyethylene-9-lauryl ether and polyoxyethylene-20-cetyl ether) (see e.g., Malmsten, M. Surfactants and polymers in drug delivery, Informa Health Care, New York, N.Y., 2002; Lee et al., Critical Reviews in Therapeutic Drug Carrier Systems, 1991, p. 92); and perfluorochemical emulsions, such as FC-43. Takahashi et al., J. Pharm. Pharmacol., 1988, 40, 252).

[0166] Fatty acids: Various fatty acids and their derivatives which act as penetration enhancers include, for example, oleic acid, lauric acid, capric acid (n-decanoic acid), myristic acid, palmitic acid, stearic acid, linoleic acid, linolenic acid, dicaprate, tricaprate, monoolein (1-monooleoyl-rac-glycerol), dilaurin, caprylic acid, arachidonic acid, glycerol 1-monocaprate, 1-dodecylazacycloheptan-2-one, acylcarnitines, acylcholines, C₁₋₂₀ alkyl esters thereof (e.g., methyl, isopropyl and t-butyl), and mono- and di-glycerides thereof (i.e., oleate, laurate, caprate, myristate, palmitate, stearate, linoleate, etc.) (see e.g., Touitou, E., et al. Enhancement in Drug Delivery, CRC Press, Danvers, Mass., 2006; Lee et al., Critical Reviews in Therapeutic Drug Carrier Systems, 1991, p. 92; Muranishi, Critical Reviews in Therapeutic Drug Carrier Systems, 1990, 7, 1-33; El Hariri et al., J. Pharm. Pharmacol., 1992, 44, 651-654).

[0167] Bile salts: The physiological role of bile includes the facilitation of dispersion and absorption of lipids and fat-soluble vitamins (see e.g., Malmsten, M. Surfactants and polymers in drug delivery, Informa Health Care, New York, N.Y., 2002; Brunton, Chapter 38 in: Goodman & Gilman's The Pharmacological Basis of Therapeutics, 9th Ed., Hardman et al. Eds., McGraw-Hill, New York, 1996, pp. 934-935). Various natural bile salts, and their synthetic derivatives, act as penetration enhancers. Thus the term “bile salts” includes any of the naturally occurring components of bile as well as any of their synthetic derivatives. Suitable bile salts include, for example, cholic acid (or its pharmaceutically acceptable sodium salt, sodium cholate), dehydrocholic acid (sodium dehydrocholate), deoxycholic acid (sodium deoxycholate), glucholic acid (sodium glucholate), glycholic acid (sodium glycocholate), glycodeoxycholic acid (sodium glycodeoxycholate), taurocholic acid (sodium taurocholate), taurodeoxycholic acid (sodium taurodeoxycholate), chenodeoxycholic acid (sodium chenodeoxycholate), ursodeoxycholic acid (UDCA), sodium tauro-24,25-dihydro-fusidate (STDHF), sodium glycodihydrofusidate and polyoxyethylene-9-lauryl ether (POE) (see e.g., Malmsten, M. Surfactants and polymers in drug delivery, Informa Health Care, New York, N.Y., 2002; Lee et al., Critical Reviews in Therapeutic Drug Carrier Systems, 1991, page 92; Swinyard, Chapter 39 In: Remington's Pharmaceutical Sciences, 18th Ed., Gennaro, ed., Mack Publishing Co., Easton, Pa., 1990, pages 782-783; Muranishi, Critical Reviews in Therapeutic Drug Carrier Systems, 1990, 7, 1-33; Yamamoto et al., J. Pharm. Exp. Ther., 1992, 263, 25; Yamashita et al., J. Pharm. Sci., 1990, 79, 579-583).

[0168] Chelating Agents: Chelating agents, as used in connection with the present invention, can be defined as compounds that remove metallic ions from solution by forming complexes therewith, with the result that absorption of vaccines through the mucosa is enhanced. With regards to their use as penetration enhancers in the present invention, chelating agents have the added advantage of also serving as DNase inhibitors, as most characterized DNA nucleases require a divalent metal ion for catalysis and are thus inhibited by chelating agents (Jarrett, J. Chromatogr., 1993, 618, 315-339). Suitable chelating agents include but are not limited to disodium ethylenediaminetetraacetate (EDTA), citric acid, salicylates (e.g., sodium salicylate, 5-methoxysalicylate and homovanilate), N-acyl derivatives of collagen, laureth-9 and N-amino acyl derivatives of beta-diketones (enamines)(see e.g., Katdare, A. et al., Excipient development for pharmaceutical, biotechnology, and drug delivery, CRC Press, Danvers, Mass., 2006; Lee et al., Critical Reviews in Therapeutic Drug Carrier Systems, 1991, page 92; Muranishi, Critical Reviews in Therapeutic Drug Carrier Systems, 1990, 7, 1-33; Buur et al., J. Control Rel., 1990, 14, 43-51).

[0169] Non-chelating non-surfactants: As used herein, non-chelating non-surfactant penetration enhancing compounds can be defined as compounds that demonstrate insignificant activity as chelating agents or as surfactants but that nonetheless enhance absorption of vaccines through the alimentary mucosa (see e.g., Muranishi, Critical Reviews in Therapeutic Drug Carrier Systems, 1990, 7, 1-33). This class of penetration enhancers include, for example, unsaturated cyclic ureas, 1-alkyl- and 1-alkenylazacyclo-alkanone derivatives (Lee et al., Critical Reviews in Therapeutic Drug Carrier Systems, 1991, page 92); and non-steroidal anti-inflammatory agents such as diclofenac sodium, indomethacin and phenylbutazone (Yamashita et al., J. Pharm. Pharmacol., 1987, 39, 621-626).

[0170] Agents that enhance uptake of vaccines at the cellular level may also be added to the pharmaceutical and other compositions of the present invention. For example, cationic lipids, such as lipofectin (Junichi et al, U.S. Pat. No. 5,705,188), cationic glycerol derivatives, and polycationic molecules, such as polylysine (Lollo et al., PCT Application WO 97/30731), are also known to enhance the cellular uptake of nucleic acids. Examples of commercially available transfection reagents include, for example Lipofectamine™ (Invitrogen; Carlsbad, Calif.), Lipofectamine 2000™ (Invitrogen; Carlsbad, Calif.), 293Fectin™ (Invitrogen; Carlsbad, Calif.), Cellfectin™ (Invitrogen; Carlsbad, Calif.), DMRIE-C™ (Invitrogen; Carlsbad, Calif.), FreeStyle™ MAX (Invitrogen; Carlsbad, Calif.), Lipofectamine™ 2000 CD (Invitrogen; Carlsbad, Calif.), Lipofectamine™ (Invitrogen; Carlsbad, Calif.), RNAiMAX (Invitrogen; Carlsbad, Calif.), Oligofectamine™ (Invitrogen; Carlsbad, Calif.), Optifect™ (Invitrogen; Carlsbad, Calif.), X-tremeGENE Q2 Transfection Reagent (Roche; Grenzacherstrasse, Switzerland), DOTAP Liposomal Transfection Reagent (Grenzacherstrasse, Switzerland), DOSPER Liposomal Transfection Reagent (Grenzacherstrasse, Switzerland), or Fugene (Grenzacherstrasse, Switzerland), Transfectam® Reagent (Promega; Madison, Wis.), TransFast™ Transfection Reagent (Promega; Madison, Wis.), Tfx™-20 Reagent (Promega; Madison, Wis.), Tfx™-50 Reagent (Promega; Madison, Wis.), DreamFect™ (OZ Biosciences; Marseille, France), EcoTransfect (OZ Biosciences; Marseille, France), TransPass^{a} D1 Transfection Reagent (New England Biolabs; Ipswich, Mass., USA), LyoVec™/LipoGen™ (Invivogen; San Diego, Calif., USA), PerFectin Transfection Reagent (Genlantis; San Diego, Calif., USA), NeuroPORTER Transfection Reagent (Genlantis; San Diego, Calif., USA), GenePORTER Transfection reagent (Genlantis; San Diego, Calif., USA), GenePORTER 2 Transfection reagent (Genlantis; San Diego, Calif., USA), Cytofectin Transfection Reagent (Genlantis; San Diego, Calif., USA), BaculoPORTER Transfection Reagent (Genlantis; San Diego, Calif., USA), TroganPORTER™ transfection Reagent (Genlantis; San Diego, Calif., USA), RiboFect (Bioline; Taunton, Mass., USA), PlasFect (Bioline; Taunton, Mass., USA), UniFECTOR (B-Bridge International; Mountain View, Calif., USA), SureFECTOR (B-Bridge International; Mountain View, Calif., USA), or HiFect™ (B-Bridge International, Mountain View, Calif., USA), among others.

[0171] Other agents may be utilized to enhance the penetration of the administered nucleic acids, including glycols such as ethylene glycol and propylene glycol, pyrrols such as 2-pyrrol, azones, and terpenes such as limonene and menthone.

### Carriers

[0172] Certain compositions of the present invention also incorporate carrier compounds in the formulation. As used herein, “carrier compound” or “carrier” can refer to a nucleic acid, or analog thereof, which is inert (i.e., does not possess biological activity per se) but is recognized as a nucleic acid by in vivo processes that reduce the bioavailability of a nucleic acid having biological activity by, for example, degrading the biologically active nucleic acid or promoting its removal from circulation. The coadministration of a nucleic acid and a carrier compound, typically with an excess of the latter substance, can result in a substantial reduction of the amount of nucleic acid recovered in the liver, kidney or other extracirculatory reservoirs, presumably due to competition between the carrier compound and the nucleic acid for a common receptor.

### Excipients

[0173] In contrast to a carrier compound, a “pharmaceutical carrier” or “excipient” is a pharmaceutically acceptable solvent, suspending agent or any other pharmacologically inert vehicle for delivering one or more nucleic acids to an animal. The excipient may be liquid or solid and is selected, with the planned manner of administration in mind, so as to provide for the desired bulk, consistency, etc., when combined with a nucleic acid and the other components of a given pharmaceutical composition. Typical pharmaceutical carriers include, but are not limited to, binding agents (e.g., pregelatinized maize starch, polyvinylpyrrolidone or hydroxypropyl methylcellulose, etc.); fillers (e.g., lactose and other sugars, microcrystalline cellulose, pectin, gelatin, calcium sulfate, ethyl cellulose, polyacrylates or calcium hydrogen phosphate, etc.); lubricants (e.g., magnesium stearate, talc, silica, colloidal silicon dioxide, stearic acid, metallic stearates, hydrogenated vegetable oils, corn starch, polyethylene glycols, sodium benzoate, sodium acetate, etc.); disintegrants (e.g., starch, sodium starch glycolate, etc.); and wetting agents (e.g., sodium lauryl sulphate, etc).

[0174] Pharmaceutically acceptable organic or inorganic excipients suitable for non-parenteral administration which do not deleteriously react with nucleic acids can also be used to formulate the compositions of the present invention. Suitable pharmaceutically acceptable carriers include, but are not limited to, water, salt solutions, alcohols, polyethylene glycols, gelatin, lactose, amylose, magnesium stearate, talc, silicic acid, viscous paraffin, hydroxymethylcellulose, polyvinylpyrrolidone and the like.

[0175] Formulations for topical administration of nucleic acids may include sterile and non-sterile aqueous solutions, non-aqueous solutions in common solvents such as alcohols, or solutions of the nucleic acids in liquid or solid oil bases. The solutions may also contain buffers, diluents and other suitable additives. Pharmaceutically acceptable organic or inorganic excipients suitable for non-parenteral administration which do not deleteriously react with vaccines which are nucleic acids can be used.

[0176] Suitable pharmaceutically acceptable excipients include, but are not limited to, water, salt solutions, alcohol, polyethylene glycols, gelatin, lactose, amylose, magnesium stearate, talc, silicic acid, viscous paraffin, hydroxymethylcellulose, polyvinylpyrrolidone and the like.

### Other Components

[0177] The compositions of the present invention may additionally contain other adjunct components conventionally found in pharmaceutical compositions, at their art-established usage levels. Thus, for example, the compositions may contain additional, compatible, pharmaceutically-active materials such as, for example, antipruritics, astringents, local anesthetics or anti-inflammatory agents, or may contain additional materials useful in physically formulating various dosage forms of the compositions of the present invention, such as dyes, flavoring agents, preservatives, antioxidants, opacifiers, thickening agents and stabilizers. However, such materials, when added, should not unduly interfere with the biological activities of the components of the compositions of the present invention. The formulations can be sterilized and, if desired, mixed with auxiliary agents, e.g., lubricants, preservatives, stabilizers, wetting agents, emulsifiers, salts for influencing osmotic pressure, buffers, colorings, flavorings and/or aromatic substances and the like which do not deleteriously interact with the nucleic acid(s) of the formulation.

[0178] Aqueous suspensions may contain substances that increase the viscosity of the suspension including, for example, sodium carboxymethylcellulose, sorbitol and/or dextran. The suspension may also contain stabilizers.

[0179] In addition to their administration, as discussed above, the vaccines featured in the invention can be administered in combination with other known agents effective in treatment of pathological processes. In any event, the administering physician can adjust the amount and timing of administration on the basis of results observed using standard measures of efficacy known in the art or described herein.

[0180] Further, toxicity and therapeutic efficacy of compounds of the invention can be determined by standard pharmaceutical procedures in cell cultures or experimental animals, e.g., for determining the LD50 (the dose lethal to 50% of the population) and the ED50 (the dose therapeutically effective in 50% of the population). The dose ratio between toxic and therapeutic effects is the therapeutic index and it can be expressed as the ratio LD50/ED50. Compounds that exhibit high therapeutic indices are preferred.

[0181] The data obtained from cell culture assays and animal studies can be used in formulating a range of dosage for use in humans. The dosage of compositions featured in the invention lies generally within a range of circulating concentrations that include the ED50 with little or no toxicity. The dosage may vary within this range depending upon the dosage form employed and the route of administration utilized. For any compound used in the methods featured in the invention, the therapeutically effective dose can be estimated initially from cell culture assays. A dose may be formulated in animal models to achieve a circulating plasma concentration range of the compound or, when appropriate, of the polypeptide product of a target sequence (e.g., achieving a decreased concentration of the polypeptide) that includes the IC50 (i.e., the concentration of the test compound which achieves a half-maximal inhibition of symptoms) as determined in cell culture. Such information can be used to more accurately determine useful doses in humans. Levels in plasma may be measured, for example, by high performance liquid chromatography.

### Patient Populations

[0182] According to the present invention, the vaccines described herein may be used prophylactically or to treat or ameliorate disease. In one embodiment the vaccine composition is administered to an asymptomatic carrier of a disease (virus) to prevent the spread to others. In another embodiment the vaccine composition is administered prophylactically. In one embodiment the vaccine composition is administered after infection but before viral shedding. In this embodiment, infection can be determined by evaluating the pathogens miRNA signature or other means of detecting the presence of the pathogen (e.g., virus or viral sequences). In one embodiment, the vaccine composition is administered after viral shedding has begun and the subject is symptomatic. In another embodiment, the vaccine composition is administered days, weeks or months after an outbreak. In one embodiment, the vaccine composition is administered to non-infected individuals to prevent their future infection by the pathogen.

[0183] In one embodiment, the invention provides pharmaceutical compositions containing a vaccine composition, as described herein, and a pharmaceutically acceptable carrier. Such pharmaceutical compositions are formulated based on the mode of delivery. One example is compositions that are formulated for systemic administration via parenteral delivery, e.g., by intravenous (IV) delivery. Another example is compositions that are formulated for direct delivery into the brain parenchyma, e.g., by infusion into the brain, such as by continuous pump infusion.

[0184] The pharmaceutical compositions featured herein are administered in dosages sufficient to trigger an immune response. In general, a suitable dose will be in the range of 0.01 to 200.0 milligrams per kilogram body weight of the recipient per day, generally in the range of 1 to 50 mg per kilogram body weight per day. For example, the vaccine can be administered at 0.05 mg/kg, 0.5 mg/kg, 1 mg/kg, 1.5 mg/kg, 2 mg/kg, 3 mg/kg, 10 mg/kg, 20 mg/kg, 30 mg/kg, 40 mg/kg, or 50 mg/kg per single dose. The pharmaceutical composition may be administered once daily or it may be administered as two, three, or more sub-doses at appropriate intervals throughout the day or even using continuous infusion or delivery through a controlled release formulation. In that case, the vaccine contained in each sub-dose must be correspondingly smaller in order to achieve the total daily dosage. The dosage unit can also be compounded for delivery over several days, e.g., using a conventional sustained release formulation which provides sustained release over a several day period. Sustained release formulations are well known in the art and are particularly useful for delivery of agents at a particular site, such as could be used with the agents of the present invention. In this embodiment, the dosage unit contains a corresponding multiple of the daily dose.

[0185] The effect of a single dose can be long lasting, such that subsequent doses are administered at not more than 3, 4, or 5 day intervals, or at not more than 1, 2, 3, or 4 week intervals. It is also understood that the compositions of the present invention may be administered on a monthly, yearly, or long-term repeated schedule as is typical with immunization or “booster” schedules. To this end the compositions may be administered every 6 months, every year, every 2 years, every 5 years or every 10 years, or more.

[0186] The skilled artisan will appreciate that certain factors may influence the dosage and timing required to effectively treat a subject, including but not limited to the severity of the disease or disorder, previous treatments, the general health and/or age of the subject, and other diseases present. Moreover, treatment of a subject with a therapeutically effective amount of a composition can include a single treatment or a series of treatments. Estimates of effective dosages and in vivo half-lives for the individual vaccine composition encompassed by the invention can be made using conventional methodologies or on the basis of in vivo testing using an appropriate animal model.

### Kits

[0187] Any of the compositions described herein may be comprised in a kit. The kit may further include reagents or instructions for creating or synthesizing the vaccines. It may also include one or more buffers, such as a nuclease buffer, transcription buffer, or a hybridization buffer, compounds for preparing the DNA template or a dsRNA, and components for isolating the resultant template, target sequence or vaccine. Other kits of the invention may include components for making a nucleic acid array and thus, may include, for example, a solid support.

[0188] The components of the kits may be packaged either in aqueous media or in lyophilized form. The container means of the kits will generally include at least one vial, test tube, flask, bottle, syringe or other container means, into which a component may be placed, and preferably, suitably aliquoted. Where there are more than one component in the kit (labeling reagent and label may be packaged together), the kit also will generally contain a second, third or other additional container into which the additional components may be separately placed. However, various combinations of components may be comprised in a vial. The kits of the present invention also will typically include a means for containing the vaccine, e.g., nucleic acids, and any other reagent containers in close confinement for commercial sale. Such containers may include injection or blow-molded plastic containers into which the desired vials are retained.

[0189] When the components of the kit are provided in one and/or more liquid solutions, the liquid solution is an aqueous solution, with a sterile aqueous solution being particularly preferred. However, the components of the kit may be provided as dried powder(s). When reagents and/or components are provided as a dry powder, the powder can be reconstituted by the addition of a suitable solvent. It is envisioned that the solvent may also be provided in another container means. In some embodiments, labeling dyes are provided as a dried power. It is contemplated that 10, 20, 30, 40, 50, 60, 70, 80, 90, 100, 120, 120, 130, 140, 150, 160, 170, 180, 190, 200, 300, 400, 500, 600, 700, 800, 900, 1000 micrograms or at least or at most those amounts of dried dye are provided in kits of the invention. The dye may then be resuspended in any suitable solvent, such as DMSO.

[0190] The container means will generally include at least one vial, test tube, flask, bottle, syringe and/or other container means, into which the vaccine, e.g., nucleic acid formulations are placed, preferably, suitably allocated. The kits may also comprise a second container means for containing a sterile, pharmaceutically acceptable buffer and/or other diluent.

[0191] The kits of the present invention may also typically include a means for containing the vials in close confinement for commercial sale, such as, e.g., injection and/or blow-molded plastic containers into which the desired vials are retained.

[0192] Kits may also include components that facilitate isolation of a DNA template. It may also include components that preserve or maintain the nucleic acids or that protect against their degradation. Such components may be RNAse-free or protect against RNAses, such as RNase inhibitors. Such kits generally will comprise, in suitable means, distinct containers for each individual reagent or solution.

[0193] A kit can include instructions for employing the kit components as well the use of any other reagent not included in the kit. Instructions may include variations that can be implemented.

### EXAMPLES

### Example 1

### Viral Attenuation Reporter System

[0194] A dual luciferase reporter system was designed to assess the efficacy of the vaccines of the present invention. In this system, attenuation is determined by monitoring luminescence of the firefly luciferase normalized to the luminescence of the renilla luciferase. Each viral gene of interest, containing one or more miRNA target sites (or mutant versions as controls), are cloned upstream of firefly luciferase gene. Constructs are expressed in a variety of mammalian cell lines and luciferase activity is measured. Successful attenuation is measured as a decrease in luciferase activity as compared to cells that are not expressing the relevant miRNA.

### Example 2

### Plaque Assay

[0195] Screening of the modified viruses may be performed by a plaque assay. When partial or complete viral genomes are modified by insertion of one or more miRNA target sites, modified viruses are screened via a plaque assay. A cell line susceptible to lytic infection is plated as a lawn. Viral supernatants generated from cells infected with modified genomes are added to the lawns at known dilutions. After incubation, cells are fixed, stained, and lytic plaques formed in the lawn are counted for back calculation of the sample's viral titer. Typically, the cell line used in the assay is a mammalian cell line, such as a rodent, non-human primate (e.g., monkey), or human cell line. Cell lines used in the invention may include Vero, MRC-5, BHK, CEM, and LL-1 cells. Relevant cell types for HSV viral replication include, but are not limited to, epithelial cells, and monocyte/dendritic cells.

[0196] A model viral genome with a modification for ease of measuring viral titer may also be employed. For instance, a viral genome encoding a GFP-fusion protein that would be packaged with the virus may serve as a beacon for measurement. Viral count may be tied to the total fluorescence measured in the supernatant via fluorimeter or spectrophotometer. Additionally, viral fluorescence of a sample may be obtained by capture of viruses on a fixed substrate such as a well in a plate or latex bead to assist with measuring. Captured viruses' fluorescence may be measured using flow cytometry or other similar methods. Viral titers could be calculated comparing a standard curve of the GFP-containing viral strain whose fluorescence in supernatants has been correlated with the plaque assay.

### Example 3

### Design of miRNA Binding Sites within HSV Genes

[0197] miRNA binding sites were engineered into either the US1 (FIG. 1A) or RL2 (FIG. 1B) genes.

[0198] Candidate HSV1 gene mRNA sequences, including US1, US10, US11, US12, RL2, and UL54, were individually aligned in the plus/minus orientation with each of the human mature miR-128, miR-219, miR-124a, miR-9, miR-135, miR-153, and miR-183 sequences via pairwise BLASTN (http://blast.ncbi.nlm.nih.gov/). Candidate mRNA /miRNA pairs that had high-scoring matches including the miRNA seed region were saved, and re-aligned manually. Next, candidate mutations were introduced to the miRNA sequence to maximize target mRNA/miRNA complementarity while minimizing alteration of target gene function (FIG. 1). Watson-Crick pairs were favored over non-canonical (“wobble”) G:U pairs. For target gene 5′- and 3′-UTR regions, all nucleotides (at each position) were considered equally functional, so engineering perfect mRNA/miRNA complementarity was straightforward. For target gene coding sequences (“CDS”), candidate mutations that minimized alteration of the encoded protein were favored: Silent mutations that do not alter the encoded amino acid, over Conservative mutations that cause an amino acid to be replaced with another amino acid bearing very similar side-chain physicochemical characteristics (e.g. Small AND Polar, Polar AND Positive, Hydrophobic AND Aromatic), over Semiconservative mutations that cause an amino acid to be replaced with another amino acid bearing similar side-chain physical characteristics (e.g. Small, Polar, Hydrophobic). Radical replacements and nonsense mutations were not considered, on the grounds that they would be maximally disruptive to target gene (protein) function.

### Example 4

### Detection and Quantitation of HSV

[0199] Total viral particles in the supernatant of cultures of infected cells is quantified by measuring the concentration of viral genomic DNA by qPCR. At the desired time point, infected cell supernatants are removed from the 96 well tissue culture plates. Viral DNA is isolated from 50u1 of the supernatant using Magmax Viral RNA Isolation Kit (Applied Biosystems, AM-1836) following the protocol as per kit instructions. Real time PCR (qPCR) is performed using 3-4 ul of obtained cDNA using a Roche LightCycler 480. Reagents used for this reaction include: Roche LightCycler PCR Master Mix and pathogen detection primer/probe kit from Primer Design Ltd for HSV 1 or 2 (Path-HSV1-std) or (Path-HSV2-std), respectively. Standard curves are generated for each qPCR reaction using the corresponding HSV strain standard obtained with the primer/probe kit from Primer Design Ltd. Six 1:10 dilutions of the standard are used to generate the standard curve from which the viral genome numbers were quantified.

[0200] Extraction of HSV DNA is performed generally by the methods of Namvar, et al. (J Clin Microbiol. 2005 May; 43(5): 2058-2064). Briefly, DNA is extracted in a Magnapure LC robot (Roche Diagnostics, Mannheim, Germany) using the Magnapure DNA Isolation Kit according to the manufacturer's instructions. The input and output volumes are set to 200 μl and 100 μl, respectively. Freeze-thawing of the sample may be used as an alternative method for DNA preparation. In these cases 10 μl of the thawed sample is used in PCR without further procedures.

1. A mutant HSV-1 strain comprising at least one miRNA site.

2. The mutant HSV-1 strain of claim 1, wherein the miRNA site is present in an untranslated region of an HSV-1 gene encoded by the HSV-1 strain.

3. The mutant HSV-1 strain of claim 2, wherein the untranslated region is selected from the group consisting of the 3′UTR, the 5′ UTR, an intron, and an intragenic region.

4. The mutant HSV-1 strain of claim 3, wherein the at least one miRNA site is selected from the miRNA sites of Table 3.

5. The mutant HSV-1 strain of claim 4, wherein the miRNA site is 17-25 nucleotides in length.

6. The mutant HSV-1 strain of claim 5, further comprising a second miRNA site.

7. The mutant HSV-1 strain of claim 6, wherein said second miRNA site has the same nucleotide sequence as the at least one miRNA site.

8. The mutant HSV-1 strain of claim 6, wherein said second miRNA site is different from the at least one miRNA site.

9. The mutant HSV-1 strain of claim 6 further comprising three or more miRNA sites.

10. The mutant HSV-1 strain of claim 1, wherein the miRNA site is present in a coding region of an HSV-1 gene encoded by the HSV-1 strain.

11. The mutant HSV-1 strain of claim 10, wherein the gene comprising the miRNA site is inactivated, thereby producing an attenuated HSV-1 virus.

12. A vaccine comprising the mutant HSV-1 strain of claim 1.

13. A method of immunizing a subject with an HSV-1 antigen comprising contacting said subject with a composition comprising a mutant HSV-1 strain, mutant HSV-1 gene or mutant HSV-1 polynucleotide sequence, wherein the mutant strain, gene or polynucleotide sequence has been engineered to contain at least one miRNA site of Table 3.

14. The method of claim 13, wherein the subject is contacted more than once.

15. The method of claim 14, wherein the subject is contacted yearly, every 2 years or every 5 years.

16. The method of claim 13, wherein composition is formulated for systemic delivery.

17. The method of claim 16, wherein systemic delivery is by intravenous or intramuscular administration.

18. The method of claim 13, wherein the composition further comprises one or more adjuvants.

19. The method of claim 18, wherein the adjuvant is a lipid or lipid-based agent.

20. The method of claim 19, wherein the lipid is a cationic lipid.

The application's sequence listing, which the Patent Office published only in electronic form, follows.

SEQUENCE LISTING (3916 sequences)

SEQ ID NO: 1 - RNA, 152261 nt, Homo sapiens
  HSV-1 viral genome
agcccgggccccccgcgggcgcgcgcgcgcgcaaaaaaggcgggcggcgguccgggcggcgugcgcgcgcgcggcgggcguggggggcggggccgcgggagcggggggaggagcggggggaggagcggggggaggagcggggggaggagcggggggaggagcggggggaggagcggggggaggagcggggggaggagcggggggaggagcggggggaggagcggggggaggagcggggggaggagcggggggaggagcggggggaggagcggggggaggagcggggggaggagcggggggaggagcggggggaggagcggccagacgccgaaaacgggccccccccaaaacacaccccccgggggucgcgcgcggcccuuuaaagcgguggcggcgggcagcccgggccccccgcggccgagacuagcgaguuagacaggcaagcacuacucgccucugcacgcacaugcuugccugucaaacucuaccaccccggcacgcucucugucuccauggcccgccgccgccgccaucgcggcccccgccgcccccggccgcccgggcccacgggcgccgucccaaccgcacagucccagguaaccuccacgcccaacucggaacccgcggucaggagcgcgcccgcggccgccccgccgccgccccccgccggugggcccccgccuucuuguucgcugcugcugcgccaguggcuccacguucccgaguccgcguccgacgacgacgaugacgacgacuggccggacagccccccgcccgagccggcgccagaggcccggcccaccgccgccgccccccggccccggcccccaccgcccggcgugggcccggggggcggggcugaccccucccacccccccucgcgccccuuccgccuuccgccgcgccucgcccuccgccugcgcgucaccgcggagcaccuggcgcgccugcgccugcgacgcgcgggcggggagggggcgccggagccccccgcgacccccgcgacccccgcgacccccgcgacccccgcgacccccgcgcgggugcgcuucucgccccacguccgggugcgccaccugguggucugggccucggccgcccgccuggcgcgccgcggcucgugggcccgcgagcgggccgaccgggcucgguuccggcgccggguggcggaggccgaggcggucaucgggccgugccuggggcccgaggcccgugcccgggcccuggcccgcggagccggcccggcgaacucggucuaacguuacacccgaggcggccugggucuuccgcggagcucccgggagcuccgcaccaagccgcucuccggagagacgauggcaggagccgcgcauauauacgcuuggagccagcccgcccucacagggcgggccgccucgggggcgggacuggccaaucggcggccgccagcgcggcggggcccggccaaccagcguccgccgagucuucggggcccggcccauugggcgggaguuaccgcccaaugggccgggccgcccacuucccgguaugguaauuaaaaacuugcaagaggccuuguuccgcuucccgguaugguaauuagaaacucauuaaugggcggccccggccgcccuucccgcuuccggcaauucccgcggcccuuaaugggcaaccccgguauuccccgccucccgcgccgcgcguaaccacuccccugggguuccggguuaugcuaauugcuuuuuuggcggaacacacggccccucgcgcauuggcccgcgggucgcucaaugaacccgcauugguccccugggguuccggguaugguaaugaguuucuucgggaaggcgggaagccccggggcaccgacgcaggccaagccccuguugcgucggcgggaggggcaugcuaaugggguucuuugggggacaccggguugggcccccaaaucgggggccgggccgugcaugcuaaugauauucuuugggggcgccggguugguccccggggacggggccgccccgcggugggccugccuccccugggacgcgcggccauugggggaaucgucacugccgccccuuuggggaggggaaaggcgugggguauaaguuagcccuggcccgacagucuggucgcauuugcaccucggcacucggagcgagacgcagcagccaggcagacucgggccgcccccucuccgcaucaccacagaagccccgccuacguugcgacccccagggacccuccguccgcgacccuccagccgcauacgacccccauggagccccgccccggagcgaguacccgccggccugagggccgcccccagcgcgaggugaggggccgggcgccaugucuggggcgccauauuggggggcgccauauuggggggcgccauguugggggacccccgacccuuacacuggaaccggccgccauguugggggacccccacucauacacgggagccgggcgccauguuggggcgccauguuagggggcguggaaccccgugacacuauauauacagggaccgggggcgccauguuagggggugcggaacccccugacccuauauauacagggaccggggucgcccuguugggggucgccaugugacccccugacuuuauauauacagacccccaacacauacacauggccccuuugacucagacgcagggcccggggucgccgugggacccccugacucauacacagagacacgcccccacaacaaacacacaaggaccggggucgccguguugggggcgugguccccacugacucauacgcaggccccccuuacucacacgcaucuagggggguggggaggagccgcccgccauauuugggggacgccgugggacccccgacuccggugcgucuggagggcgggagaagagggaagaagaggggucgggauccaaaggacggacccagaccaccuuugguugcagaccccuuucuccccccucuuccgaggccagcaggggggcaggacuuugugaggcgggggggggagagggggaacucgugggugcugauugacgcgggaaauccccccccauucuuacccgccccccuuuuuuccccuuagcccgccccggaugucuggguguuucccugcgaccgagaccugccggacagcagcgacucugaggcggagaccgaagugggggggcggggggacgccgaccaccaugacgacgacuccgccuccgaggcggacagcacggacacggaacuguucgagacggggcugcuggggccgcagggcguggaugggggggcggucucgggggggagccccccccgcgaggaagaccccggcaguugcgggggcgcccccccucgagaggacggggggagcgacgagggcgacgugugcgccgugugcacggaugagaucgcgccccaccugcgcugcgacaccuucccgugcaugcaccgcuucugcaucccgugcaugaaaaccuggaugcaauugcgcaacaccugcccgcugugcaacgccaagcugguguaccugauagugggcgugacgcccagcgggucguucagcaccaucccgaucgugaacgacccccagacccgcauggaggccgaggaggccgucagggcgggcacggccguggacuuuaucuggacgggcaaucagcgguucgccccgcgguaccugacccugggggggcacacggugagggcccugucgcccacccacccggagcccaccacggacgaggaugacgacgaccuggacgacggugaggcggggggcggcaaggacccugggggaggaggaggaggagggggggggagggaggaauaggcgggcgggcgaggaaagggcgggccggggagggggcguaaccugaucgcgccccccguugucucuugcagcagacuacguaccgcccgccccccgccggacgccccgcgcccccccacgcagaggcgccgccgcgccccccgugacgggcggggcgucucacgcagccccccagccggccgcggcucggacagcgccccccucggcgcccaucgggccacacggcagcaguaacaccaacaccaccaccaacagcagcggcggcggcggcucccgccagucgcgagccgcggcgccgcggggggcgucuggccccuccggggggguugggguugggguugggguuguugaagcggaggcggggcggccgaggggccggacgggcccccuugucaacagacccgccccccuugcaaacaacagagaccccauagugaucagcgacucccccccggccucuccccacaggccccccgcggcgcccaugccaggcuccgccccccgccccgggccccccgcguccgcggccgcgucgggacccgcgcgcccccgcgcggccguggccccgugcgugcgagcgccgccuccggggcccggcccccgcgccccggcccccggggcggagccggccgcccgccccgcggacgcgcgccgugugccccagucgcacucgucccuggcucaggccgcgaaccaagaacagagucugugccgggcgcgugcgacgguggcgcgcggcucgggggggccgggcguggagggugggcacgggcccucccgcggcgccgcccccuccggcgccgccccgcuccccuccgccgccucugucgagcaggaggcggcggugcguccgaggaagaggcgcgggucgggccaggaaaaccccuccccccaguccacgcgucccccccucgcgccggcaggggccaagagggcggcgacgcacccccccuccgacucagggccgggggggcgcggccagggugggcccgggaccccccugacguccucggcggccuccgccucuuccuccucugccucuuccuccucggccccgacccccgcgggggccgccucuuccgccgccggggccgcguccuccuccgcuuccgccuccucgggcggggccgucggugcccugggagggagacaagaggaaaccucccucggcccccgcgcugcuucugggccgcgggggccgaggaagugugcccggaagacgcgccacgcggagacuuccggggccguccccgcgggcggccucacgcgcuaccugcccaucucgggggucucuagcguggucgcccugucgccuuacgugaacaagacuaucacgggggacugccugcccauccuggacauggagacggggaacaucggggcguacgugguccugguggaccagacgggaaacauggcgacccggcugcgggccgcgguccccggcuggagccgccgcacccugcuccccgagaccgcggguaaccacgugaugccccccgaguacccgacggcccccgcgucggaguggaacagccucuggaugacccccguggggaacaugcuguucgaccagggcacccuagugggcgcccuggacuuccgcagccugcggucucggcacccgugguccggggagcagggggcgucgacccgggacgagggaaaacaauaagggacgccccccguguuuguggggaggggggggucgggcgcuggguggucucuggccgcgcccacuacaccagccaauccgugucggggaggggaaaagugaaagacacgggcaccacacaccagcgggucuuuuguguuggcccuaauaaaaaaaaacucaggggauuuuugcugucuguugggaaauaaagguuuacuuuuguaucuuuucccugucuguguuggauguaucgcggggaugcgugggagugggggugcgugggagugggggugcgugggagugggggugcgugggagugggggugcgugggagugggggugcgugggagugggggugcgugggagugggggugcgugggagugggggugcgugggagugggggugccauguugggcaggcucugguguuaaccacagagccgcggcccgggcugccugaccaccgauccccgaaagcauccugccacuggcauggagccagaaccacaguggguuggguguggguguuaaguuuccgcgagcgccugcccgcccggacugaccuggccucuggccgccacaaagggcgggggggguuaacuacacuauagggcaacaaaggaugggagggguggcggggcgggacggggcgcccaaaagggggucggccacaccacagacguggguguugggggguggggcggaggggugggggggggggagacagaaacaggaacauaguuagaaaacaagaaugcggugcagccagagaaucacaggagacgaggggaugggcguguugguuaccaacccacacccaggcaugcucggugguaugaaggagggggggcggugcuucuuagagaccgccgggggacgugggguuggugugcaaaggcacgcgcacccgcgcggccaggugggccgguacuccaucccccccucccccgacccuucccacccccgcgugccagagaucaccccggucccccggcacccgccacuccuccguauccucgcuuuaggaacaacuuuaggggggguacacacgcgccgugcauuuccuuccacacccccccucccccgcacuccccccccccaggcaguaagacccaagcauagagagccaggcacaaaaacacaggcggggugggacacaugccuucuuggaguacgugggucauuggcgugggggguuacagcgacaccggccgacccccuggcggucuuccagccggcccuuagauaagggggcaguugguggucggacggguaaguaacagagucugacuaagggugggagggggggaaaagaacgggcuggugugcuguaacacgagcccacccgcgaguggcguggccgaccuuagccucuggggcgcccccugucguuuggguccccccccucuauuggggagaagcaggugucuaaccuaccuggaaacgcggcgucuuuguugaacgacaccggggcgcccucgacgagugggauaacgggggaggaagggagggaggaggguacugggggugaagaaggggggggggagaagcgagaacaggaaaggcgauggagcccggcagaacaccgaggaaaaaaaaaccacagcgcaugcgccgggccguuguggggccccgggccggggccccuuggguccgccggggccccgggccgggccgccacgggggccggccguuggcgguaaccccgaguguucaucucaggccccgggccgggaacccggaaaagccuccggggggccuuuuucgcgucgcgugccggcgagcggguccggacggggcccggaccgccgcggucgggggccccucgucccgggccguacgcggccuucgccccgugaggggacagacgaacgaaacauuccggcgacggaacgaaaaacaccccagacggguuaaagaaacagaaaccgcaacccccaccacccccgaaacggggaaaacgaaaaaacagaccagcggccggccggcgcuuagggggaggaugucgccgacgccccuuggccgccccggcugcaggggggcccggagagccgcggcacccggacgcgcccggaaagucuuucgcaccacccgcgaucggcacggccgcgcccccgcuuuuauaaaggcugagaugacgcagcaaaaacaggccacagcaccacguggguaggugauguaauuuuauuuuccucgucugcggccuaauggauuuccgggcgcggugccccugucugcagagcacuuaacggauugauaucucgcgggcacgcgcgcccuuaauggaccggcgcggggcggggggccggauacccacacgggcggggggggggugucgcgggccgucugcuggcccgcggccacauaaacaaugacucugggccuuucugccucugccgcuugugagugcgcgcgccggcucugcggugucggcggcggcugcggcggcugcggcggccgccguguucggucucgguagccggccggcggguggacucgcggggggccggaggguggaaggcagggggguguaggauggguaucaggacuuccacuucccguccuuccaucccccguuccccucgguuguuccucgccucccccaacaccccgccgcuuuccguugggguuguuauuguugucgggaucgugcgggccgggggucgccggggcaggggcgggggcgugggcgggggugcucgucgaucgaccgggcucagugggggcguggggugggugggagaaggcgaggagacuggggugggggugucggugggugguuguuuuuugugguuguuuuugugucuguucccgucccccgucacccccucccuccguccccuccguccccccgucgcggguguuuguguuuguuuauuccgacauugguuuauuuaaauaaacacagccguucugcgugucuguucuugcguguggcugggggcuuauauguggggucccgggggcgggaugggguuuagcggcggggggcggcgcgccggacggggcgcuggagauaacggcccccggggaacgggggaccggggcuggguaucccgaggugggugggugggcggcgguggccgggccgggccgggccgggccgggccgggugggcgggguuuggaaaaacgaggaggaggaggagaaggcgggggggggggagacggggggaaagcaaggacacggcccggggggugggagcgcgggccgggccgcucguaagagccgcgacccggccgccggggagcguugucgccgucggucugccggcccccgucccucccuuuuuugaccaaccagcgcccccccccccccucaccaccauuccuacuaccaccaccaccaccaccaccgacaccucccgcgcacccccgcccacauccccccccaacccgcaccaccagcacggguuggggguagcaggggaucaaaggggggcaaagcggcggggcgguucggggggggggggggggggcgggaaaccaaguaggcccgcccauccgcggccccucccggcagccacgcccccagcgucgggugucacggggaaagagcagaggggagaggggagagggggggagaggggagagggggggagaggggagagggggggagaggggagagggggggagaggggagagggggggagaggggagagggggggagaggggagagggggggagaggggagagggggggagaggggagagggggggagaggggagagggggggagaggggguauauaaaccaacgaaaagcgcgggaacggggauacggggcuuguguggcacgacgucgugguuguguuacugggcaaacacuuggggacuguagguuucugugggugccgacccuaggcgcuauggggauuuuggguugggucgggcuuauugccguugggguuuugugugugcgggggggcuugccuucaaccgaauauguuauucggagucggguggcucgagaggugggggauauauuaaaggugccuugugugccgcucccgucugacgaucuugauuggcguuacgagacccccucggcuauaaacuaugcuuugauagacgguauauuuuugcguuaucacugucccggauuggacacggucuugugggauaggcaugcccagaaggcauauuggguuaaccccuuuuuauuuguggcggguuuuuuggaggacuugaguuaccccgcguuuccugccaacacccaggaaacagaaacgcgcuuggcccuuuauaaagagauacgccaggcgcuggacagucgcaagcaggccgccagccacacaccugugaaggcugggugugugaacuuugacuauucgcgcacccgccgcuguguagggcgacaggauuugggaccuaccaacggaacgucuggacggaccccgguucugccgccggacgaugaagcgggccugcagccgaagccccucaccacgccgccgcccaucaucgccacgucggaccccaccccgcgacgggacgccgccacaaaaagcagacgccgacgaccccacucccggcgccucuaacgaugccucgacggaaacccguccggguucggggggcgaaccggccgccugucgcucgucagggccggcggcgcuccucgccgcccuagaggcuggucccgcuggugugacguuuuccucguccgcgccccccgacccucccauggauuuaacaaacgggggggugucgccugcggcgaccucggcgccucuggacuggaccacguuucggcguguguuucugaucgacgacgcguggcggccccugauggagccugagcuggcgaaccccuuaaccgcccaccuccuggccgaauauaaucgucggugccagaccgaagaggugcugccgccgcgggaggauguguuuucguggacucguuauugcacccccgacgaggugcgcgugguuaucaucggccaggacccauaucaccaccccggccaggcgcacggacuugcguuuagcgugcgcgcgaacgugccgccucccccgagucuucggaaugucuuggcggccgucaagaacuguuaucccgaggcacggaugagcggccacgguugccuggaaaagugggcgcgggacggcguccuguuacuaaacacgacccugaccgucaagcgcggggcggcggcgucccacucuagaaucgguugggaccguuucgugggcggaguuauccgccgguuggccgcgcgccgccccggccugguguuuaugcucuggggcacacacgcccagaaugccaucaggccggacccucggguccauugcguccucaaguuuucgcacccgucgccccucuccaagguuccguucggaaccugccagcauuuccucguggcgaaccgauaccucgagacccggucgauuucacccaucgacuggucgguuugaaaggcaucgacguccgggguuuuugucggugggggcuuuuggguauuuccgaugaauaaagacgguuaaugguuaaaccucuggucucauacgggucggugaugucgggcgucgggggagagggaguucccucugcgcuugcgauucuagccucguggggcuggacguucgacacgccaaaccacgagucggggauaucgccagauacgacucccgcagauuccauucggggugccgcuguggccucaccugaccaaccuuuacacgggggcccggaacgggaggccacagcgccgucuuucuccccaacgcgcgcggaugacggcccgcccuguaccgacgggcccuacgugacguuugauacccuguuuauggugucgucgaucgacgaauuagggcgucgccagcucacggacaccauccgcaaggaccugcgguugucgcuggccaaguuuagcauugcgugcaccaagaccuccucguuuucgggaaacgccccgcgccaccacagacgcggggcguuccagcgcggcacgcgggcgccgcgcagcaacaaaagccuccagauguuuguguugugcaaacgcgcccacgccgcucgagugcgagagcagcuucgggucguuauucagucccgcaagccgcgcaaguauuacacgcgaucuucggacgggcggcucugccccgccguccccguguucguccacgaguucgucucguccgagccaaugcgccuccaccgagauaacgucaugcuggccucgggggccgaguaaccgccccccccccaugccacccucacugcccgucgcgcguguuugauguuaauaaauaacacauaaauuuggcugguuguuuguugucuuuaauggaccgcccgcaagggggggggggcauuucagugucgggugacgagcgcgauccggccgggauccuaggaccccaaaaguuugucugcguauuccagggcggggcucaguugaaucucccgcagcaccucuaccagcagguccgcggugggcuggagaaacucggccgucccggggcaggcgguugucggggguggaggcgcggcgcccaccccgugugccgcgccuggcgucuccucugggggcgacccguaaaugguugcagugauguaaaugguguccgcgguccagaccacggucaaaaugccggccguggcgcuccgggcgcuuucgccgcgcgaggagcugacccaggagucgaacggauacgcguacauaugggcgucccacccgcguucgagcuucugguugcugucccggccuauaaagcgguaggcacaaaauucggcgcgacagucgauaaucaccaacagcccaaugggggugugcuggauaacaacgccuccgcgcggcaggcgguccuggcgcucccggccccguaccaugaucgcgcgggugccguacucaaaaacaugcaccaccugcgcggcgucgggcagugcgcuggucagcgaggcccuggcguggcauaggcuauacgcgauggucgucuguggauuggacaucucgcgguggguagugagucccccgggccggguucgguggaacuguaaggggacggcggguuaauagacaaugaccacguucggaucgcgcagagccgauaguaugugcucacuaaugacgucaucgcgcucguggcgcucccggagcggauuuaaguucaugcgaaggaauucggaggagguggugcgggacauggccacguacgcgcuguugaggcgcagguugccgggcguaaagcagauggcgaccuuguccaggcuaaggcccugggagcgcgugauggucauggcaagcuuggagcugaugccguagucggcguuuauggccauggccagcuccguagagucaauggacucgacaaacucgcugauguugguguugacgacggacaugaagccguguuggucccgcaagaccacguaaggcaggggggccucuuccaguaacucggccacguuggccgucgcgugccgccuccgcagcucguccgcaaaggcaaacacccgugcguacguguaucccaugagcguauaauuguccgucugcagggcgacggacaucagccccccgcgcggcgagccggucagcaucucgcagccccggaagauaacguuguccacguacgugcuaaagggggcgacuucaaaugccuccccgaagagcucuuggaggauucggaaucucccgaggaaggcccgcuucagcagcgcaaacugggugugaacggcggcgguggucuccgguuccccggggguguaguggcaguaaaacacgucgagcuguuguucguccagccccgcgaaaauaacgucgaggucgucgucgggaaaaucguccgggcccccgucccgcggccccaguugcuuaaaaucaaacgcacgcucgccgggggcgccugcgucggccauuaccgacgccugcgucggcacccccgaagauuuggggcgcagagacagaaucuccgccguuaguucucccaugcgggcguaggcgaggguccucugggucgcauccaggcccgggcgcugcagaaaguuguaaaaggagauaagcccgcuaaauaugagccgcgacaggaaccuguaggcaaacuccaccgaagucucccccugagucuuuacaaagcugucgucacgcaacacugccucgaaggcccggaacgucccacuaaacccaaaaaccaguuuucgcaggcgcgcggucaccgcgaucuggcuguugaggacguaagugacgucguugcgggccacgaccagcugcuguuugcugugcaccucgcagcgcaugugccccgcguccugguccuggcucugcgaguaguuggugaugcggcuggcguuggccgugagccacuuuucaaucgucaggccgggcuggugugucagccgucgguauucgucaaacuccuugaccgacacgaacguaagcacggggagggugaacacgacgaacucccccucacgggucaccuucagguaggcguggagcuuggccauguacgcgcucaccucuuugugggaggagaacagccgcguccagccggggagguuggcgggguuggugauguaguuuuccgggacgacgaagcgauccacgaacugcaugugcuccucggugaugggcaggccguacuccagcaccuucaugagguuaccgaacucgugcucgacgcaccguuuguuguuaauaaaaauggcccagcuauacgagaggcgggcguacucgcgcagcgugcgguugcagaugagguacgugagcacguucucgcucuggcggacggaacaccgcaguuucuggugcucgaaggucgacuccagggacgccgucugcgucggcgagcccacacacaccaacacgggccgcaggcgggccgcguacuggggggugugguacagggcguuaaucauccaccagcaauacaccacggccgugaggaggugacgcccaaggagcccggccucgucgaugacgaucacguugcugcggguaaaggccggcagcgccccguggguggccggggccaaccgcgucagggcgcccucggccaaccccaggguccguuccagggcggccagggcgcgaaacucguuccgcaacuccucgcccccggaggcggccagggcgcgcuucgugagguccaaaaucaccucccaguaguacgucagaucucgucgcugcagguccuccagcgaggcgggguugcuggucaggguguacggguacugucccaguugggccuggacgugauucccgcgaaacccaaauucaugaaagaugguguugaugggucggcugagaaaggcgcccgagaguuuggcguacauguuuugggccgcaaugcgcguggcgcccgucaccacacaguccaagaccucguugauugucugcacgcacgugcucuuuccggagccagcguugccggugauaagauacaccgcgaacggaaacucccugaggggcaggccugcgggggacucuaaggccgccacgucccggaaccacugcagauggggcacuugcgcuccgucgagcuguuguugcgagagcucucggaugcgcuuaaggauuggcugcaccccgugcauagacguaaaauuuaaaaaggccucggcccucccuggaacggcuggucgguccccggguugcugaaggugcggcgggccggguuucuguccgucuagcuggcgcuccccgccggccgccgccaugaccgcaccacgcucgcgggcccccacuacgcgugcgcggggggacacggaagcgcugugcucccccgaggacggcuggguaaagguucaccccagccccgguacgaugcuguuccgcgagauucuccacgggcagcugggguauaccgagggccaggggguguacaacgucguccgguccagcgaggcgaccacccggcagcugcaggcggcgaucuuucacgcgcuccucaacgccaccacuuaccgggaccucgaggcggacuggcucggccacguggcggcccgcggucugcagccccaacggcugguucgccgguacaggaacgcccgggaggcggauaucgccgggguggccgagcggguguucgacacguggcggaacacgcuuaggacgacgcugcuggacuuugcccacggguuggucgccugcuuugcgccgggcggcccgagcggcccgucaagcuuccccaaauauaucgacuggcugacgugccuggggcugguccccauauuacgcaagcgacaagaagggggugugacgcagggucugagggcguuucucaagcagcacccgcugacccgccagcuggccacggucgcggaggccgcggagcgcgccggccccggguuuuuugagcuggcgcuggccuucgacuccacgcgcguggcggacuacgaccgcguguauaucuacuacaaccaccgccggggcgacuggcucgugcgagaccccaucagcgggcagcgcggagaaugucuggugcuguggccccccuuguggaccggggaccgucuggucuucgauucgcccguccagcggcuguuucccgagaucgucgcgugucacucccuccgggaacacgcgcacgucugccggcugcgcaauaccgcguccgucaaggugcugcuggggcgcaagagcgacagcgagcgcgggguggccggugccgcgcgggucguuaacaagguguugggggaggacgacgagaccaaggccgggucggccgccucgcgccucgugcggcuuaucaucaacaugaagggcaugcgccacguaggcgacauuaacgacaccgugcguuccuaccucgacgaggccggggggcaccugauagacgccccggccgucgacgguacccucccuggauucggcaagggcggaaacagccgcgggucugcgggccaggaccagggggggcgggcgccgcagcuucgccaggccuuccgcacggccgugguuaacaacaucaacggcguguuggagggcuauauaaauaaccuguuuggaaccaucgagcgccugcgcgagaccaacgcgggccuggcgacccaauugcaggagcgcgaccgcgagcuccggcgcgcaacagcgggggcccuggagcgccagcagcgcgcggccgaccuggcggccgaguccgugaccgguggaugcggcagccgcccugcgggggcggaccugcuccgggccgacuaugacauuaucgacgucagcaaguccauggacgacgacacguacgucgccaacagcuuucagcacccguacaucccuucguacgcccaggaccuggagcgccugucgcgccucugggagcacgagcuggugcgcuguuuuaaaauucugugucaccgcaacaaccagggccaagagacgucgaucucguacuccagcggggcgaucgccgcauucgucgcccccuacuuugagucagugcuucgggccccccggguaggcgcgcccaucacgggcuccgaugucauccugggggaggaggaguuaugggaugcgguguuuaagaaaacccgccugcaaacguaccugacagacaucgcggcccuguucgucgcggacguccagcacgcagcgcugcccccgccccccuccccggucggcgccgauuuccggcccggcgcguccccgcggggccgguccagaucgcggucgcccggaagaacugcgcgaggcgcgccggaccagggcgggggcaucgggcaccgggauggccgccgcgacggccgacgaugaggggucggccgccaccauccucaagcaggccaucgccggggaccgcagccuggucgaggcggccgaggcgauuagccagcagacgcugcuccgccuggccugcgaggugcgccaggucggcgaccgccagccgcgguuuaccgccaccagcaucgcgcgcgucgacgucgcgccugggugccgguugcgguucguucuggacgggagucccgaggacgccuaugugacgucggaggauuacuuuaagcgcugcugcggccaguccaguuaucgcggcuucgcgguggcgguccugacggccaacgaggaccacgugcacagccuggccgugcccccccucguucugcugcaccgguucucccuguucaaccccagggaccuccuggacuuugagcuugccugucugcugauguaccuggagaacugcccccgaagccacgccaccccgucgaccuuugccaagguucuggcguggcucggggucgcgggucgccgcacguccccauucgaacgcguucgcugccuuuuccuccgcaguugccacuggguccuaaacacacucauguucaugguguacguaaaaccguucgacgacgaguucguccugccccacugguacauggcccgguaccugcuggccaacaacccgccccccguucucucggcccuguucugugccaccccgacgagcuccucauuccggcugccggggccgcccccccgcuccgacugcguggccuauaaccccgccgggaucauggggagcugcugggcgucggaggaggugcgcgcgccucuggucuauugguggcuuucggagaccccaaaacgacagacgucgucgcuguuuuaucaguuuuguugaauuuuaggaaauaaacccgguuuuguuucuguggccucccgacggaugcgcguguccuuacuccgucuugguggguggguggcuguguauggcgucccaucugugcggggaggggggcaagucggcacguauucggacagacucaagcacacacgggggagcgcucuugucucagggcaauguuuuuauuggucaaacucaggcaaacagaaacgacaucuugucgucaaagggauacacaaacuucccccccucgccccauacucccgccagcaccccgguaaacaccaacucaaucucgcgcaggauuucgcgcaggugaugagcgcaguccacgggggggagcacaaggggccgcggguauagaucgacggggacgccgaccgacuccccgccuccgggacagacacgcacgacgcgccgccaguagugcucugcguccagcaaggcgccgccgcggaaggcaguggggggcaaggggucgcuggccucaaagggggacacccgaacgcuccaguacuccgcguccaaccguuuauuaaacgcguccaagauaaggcggucgcaggcguccuccauaaggccccgggccgugagugcguccuccuccggcacgcaugccguugucaggcccaggacccgucgcagcgugucgcguacgaccccugccgccgugguguacgcgggcccgcggagaggaaaucccccaagauggucaguguugucgcgggaguuccagaaccacacucccgccuggcuccaggcgacugcguggguguagacgcccucgagggccaggcacagugggugccgcagccggacggcguuggcccuaagcacggcucccacggccgucucgauggcccgccgggcguccucgaucaccccggaagccgcauccgcgucuuggggguccacguuaaagacaccccagaacgcacccccaucgcccccgcagaccgcgaacuucaccgagcuggccgucuccucgaucugcaggcagacggcggccauuaccccacccaggagcugccgcagcgcagggcaggcguugcacguguccgggaccaggcgcuccaagacggccccggcccagggcucugagggagcggccaccaccagcgcguccagucuugcuaggcccguccggccguggggguccgccagcccgcuccccccgaggucggccagggccgccaggagcugggcgcgaaguccggggaagcaaaaccgcgccguccagacgggcccgacggccgcgggcgggucuaacaguuggaugauuuuaguggcgggaugccaccgcgccaccgccucccgcaccgcgggcaggaggcauccggcugccgccgaggccacgccgggccaggcucgcggggggaggacgacccuggcccccaccgcgggccaggcccccaggagcgcggcguaagcggccgcggccccgcgcaccaggucccgugccgacucggccguggccggcacggugaacgugggccaacccggaaaccccaggacggcaaaguacgggacgggucccccccggaccucaaacucgggccccagaaaggcaaagacgggggccagggccccgggggcggcguggaccgugguaugccacugccggaaaagggcgacgagcgccggcgcggagaacuucucgccggcgcuuacaaaguagucguaaucgcggggcagcagcacccgugccgugacucguugcgggugcccgcguggccgcaggcccaccucgcacaccucgaccagguccccgaacgcgcccuccuucuugaucggcggaaacgcaagagucugguauucgcgcgcaaauagcgcgguuccgguggugauguuaacggucagcgaagcggcggacgcgcacuggggggugucgcgaauggccgccaggcgcgcccacgccagccgcgcgucgggaugcucggcaacgcgcgccgccagggccauagggucgaugucaauguuggccuccgcgaccaggagagcggcgcgaggggcggcgggcgggccccacgacgcucucucaacuuucaccaccagucccgugcguggguccgagccgauacgcagcggggcgaacagggccaccggcccggucuggcgcuccagggccgccaggacgcacgcguacagcgcccgccacagagucggguucuccaggggcuccagcggggaggcggccggcgucgucgcggcgcgggcggccgccacgacggccuggacggagacguccgcggagccguagaaaucccgcagcuccgucgcggugacggagaccuccgcaaagcgcgcgcgacccuccccugcggcguugcgacauacaaaauacaccagggcguggaaguacucgcgagcgcgggggggcagccauaccgcguaaaggguaauggcgcugacgcucuccuccacccacacgauaucugcgguguccaucgcacggccccuaaggaucacgggcggucugugggucccaugcugccgugccuggccgggcccggugggucgcggaaaccggugacggggggggggcgguuuuugggguuggggugggggugggaaacggcccggguccgggggccaacuuggccccucggugcguuccggcaacagcgccgccgguccgcggacgaccacguaccgaacgagugcggucccgagacuuauagggugcuaaaguucaccgcccccugcaucaugggccaggccucgguggggagcuccgacagcgccgccuccaggaugaugucagcguugggguuggcgcuggaugagugcgugcgcaaacagcgcccccacgcgggcacgcguagcuugaagcgcgcgcccgcaaacucccgcuugugggccauaagcagggcguacagcugccuguggguccggcaggcgcuguggucgauguggugggcguccaacaaccccacgauugucuguuuggugagguuuuuaacgcgccccgccccgggaaacgucugcgugcuuuuggccaucugcacgccaaacaguucgccccagauuaucuugaacagcgccaccgcgugguccgucucgcuaacggacccgcgcgggggacagccgcuuagggcgucggcgacgcgcuugacggcuuccuccgagagcagaaguccgucgguuacguuacaguggcccaguucgaacaccagcugcauguagcggucguaguggggggucaguagguccagcacgucaucggggccgaagguccucccagaucccccggccgccgagucccaaugcaggcgcgcggccauggugcugcacaggcacaacagcucccagacggggguuacguucaggguggggggcagggccacgagcuccagcucuccggugacguugaucguggggaugacgcccguggcguaguggucauagauccgccgaaauauggcgcugcugcggguggccaugggaacgcggagacaggccuccagcaacgccagguaaauaaaccgcgugcgucccaucaggcuguugagguugcgcaugagcgcgacaauuuccgccggcgcgacaucggaccggagguauuuuucgacgaaaagacccaccuccuccgucucggcggccugggccggcagcgacgccucgggaucccggcaccgcagcucccguagaucgcgcugggcccugagggcgucgaaauguacgccccgcaaaaacagacagaaguccuuuggggucaggguaucgucguguccccagaagcgcacgcguaugcaguuuagggucagcagcaugugaaggauguuaaggcuguccgagagacacgccagcgugcaucucucaaaguaguguuuguaacggaauuuguuguagaugcgcgacccccgccccagcgacgugucgcaugccgacgcgucacagcgccccuugaaccggcgacacagcagguuugugaccugggagaacugcgcgggccacuggccgcaggaacugaccacgugauuaaggagcaugggcguaaagacgggcuccgagcgcgccccggagccguccauguaaaucaguagcucccccuugcggagggugcgcacccgucccagggacugguacacggacaccauguccgguccguaguucauggguuucacguaggcgaacaugccaucaaagugcaggggaucgaagcugaggcccacgguuacgaccgucguguauauaaccacgcgguauuggccccacguggucacguccccgaggggggugagcgagugaagcaacagcacgcgguccguaaacugacggcagaaccgggccacgaucuccgcgaaggagaccgucgacgaaaaaaugcagauguuaucgcccccgccaaggcgcgcuuccagcuccccaaagaacguggccccccgggccuccggagaggcguccggagacgggccgcucggcggcccgggcgggcgcagggcagccugcaggagcucgguccccagacgcgggagaaacaggcaccggcgcgccgaaaacccgggcauggcguacucgccgaccaccacaugcacguuuuuuucgccccggagaccgcacaggaaguccaccaacugcgcguuggcgguugcguccauggcgaugauccgaggacagaugcgcagcaggcguagcauuaacgcauccacgcggcccaguugcugcaucguuggcgaauagagcuggcccagcgucgacauaaccucguccagaacgaggacgucguaguuguucagaagguuggggcccacgcgaugaaggcuuuccaccuggacgauaagucgguggaaggggcggucguucauaauguaauugguggaugagaaguaggugacaaagucgaccaggccugacucagcgaaccgcgucgcuagggucuggguaaaacuccgacgacaggagacgacgagcacacucguguccggagaguggaucgcuucccgcagccagcggaucagcgcgguaguuuuucccgaccccauuggcgcgcggaccacagucacgcaccuggccgucggggcgcucgcguuggggaaggugacggguccgugcugcugccgcucgaucguuguuuucgggugaacccggggcacccauucggccaaaucccccccguacaacauccgcgcuagcgauacgcucgacguguacuguucgcacucgucguccccaaugggacgcccggcccccagaggaucucccgacuccgcgccccccacgaaaggcaugaccggggcgcggacggcguggugggucuggugugugcagguggcgacguuuguggucucugcggucugcgucacggggcuccucguccuggccucuguguuccgggcacgguuucccugcuuuuacgccacggcgagcucuuaugccggggugaacuccacggccgaggugcgcggggguguagccgugccccucagguuggacacgcagagccuugugggcacuuauguaaucacggccguguuguuguuggccguggccguguaugccguggucggcgccgugaccucccgcuacgaccgcgcccuggacgcgggccgccgucuggcugcggcccgcauggccaugccgcacgccacgcugaucgccggaaacgucugcucuugguugcugcagaucaccguccuguugcuggcccaucgcaucagccagcuggcccaccugguuuacguccugcacuuugcgugucugguguauuuugcggcccauuuuugcaccagggggguccugagcgggacguaucugcgucaggugcacggccugauggagcuggccccgacccaucaucgcgucgucggcccggcucgcgccgugcugacaaacgccuugcuguugggcgucuuccugugcacggccgacgccgcgguaucccugaauaccaucgccgcguucaacuuuaauuuuucggccccgggcaugcucaucugccugaccgugcuguucgccauucucgucguaucgcuguuguugguggucgaggggguguugugucacuacgugcgcguguuggugggcccccaccugggggccguggccgccacgggcaucgucggccuggccugcgagcacuauuacaccaacggcuacuacguuguggagacgcaguggccgggggcucagacgggaguccgcgucgcccucgcccuggucgccgccuuugcccucggcauggccgugcuccgcugcacccgcgccuaucuguaucacaggcggcaccacaccaaauuuuuuaugcgcaugcgcgacacgcgacaccgcgcacauuccgcccucaagcgcguacgcaguuccaugcgcggaucgcgagacggccgccacaggcccgcacccggcagcccgcccgggauucccgaauaugcggaagaccccuacgcgaucucauacggcggccagcucgaccgguacggagauuccgacggggagccgauuuacgacgagguggcggacgaccaaaccgacguauuguacgccaagauacaacacccgcggcaccugcccgacgacgaucccaucuaugacaccguugggggguacgaccccgagcccgccgaggaccccguguacagcaccguccgccguugguagcuguuugguuccguuuuaauaaaccguuuguguuuaacccgaccgugguguaugucugguguguggcguccgaucccguuacuaucaccgucccccccccccccucaaccccggcgauuguggguuuuuuaaaaacgacacgcgugcgaccguauacagaacauuguuuugguuuuuauucgcuaucggacaugggggguggaaacuggguggcggggcaggcgccuccggggguccgccggugaguguggcgcgaggggggguccgaugaacgcaggcgcugucuccccggggcccgcguaaccccgcgcauauccgggggcacguagaaauuaccuuccucuucggacucgauauccacgacgucaaagucgugggcggucagcgagacgaccuccccgucgucggugaugaggacguuguuucggcagcagcagggccgggccccggagaacgagaggcccauagcucggcgagcgugucgucgaaugccaggcggcugcuucgcuggauggccuuauagaucuccggaucgaugcggacggggguaaugaucagggcgaucggaacggccugguucgggagaauggacgccuugcuggguccugcggccccgagagccccggcgccguccuccaggcggaacguuacgcccuccuccgcgcuggugcggugccugccgauaaacgucaccagaugcggguggggggggcagucggggaaguggcugucgagcacguagcccugcaccaagaucugcuuaaaguucgggugacggggguucgcgaagacgggcucgcggcggaccagauccccggagcuccaggacacgggggagaugguguggcguccgaggucgggggcgccaaacagaagcaccuccgagacaacgccgcuauuuaacuccaccaaggcccgauccgcggcggagcaccgccuuuuuucgcccgaggcgugggccucugaccaggccuggucuugcgugacgagagccuccuccgggccggggacgcgcccgggcgcgaaguaucgcacgcugggcuucgggaucgaccggauaaaugcccggaacgccuccggggaccggugugccaucaaguccucguacgcggaggccguggggucgcugggguccauggggucgaaagcguacuuggcccggcauuugaccucguaaaaggccaggggggucuuggggacuggggccagguagccgugaaugucccgaggacagacgagaauauccagggacgccccgaccauccccgugugaccguccaugaggaccccacacguaugcacguucucuucggcgaggucgcuggguucguggaagauaaagcgccgcgugucggcgccggccucgccgccgucguccgcgcggcccacgcaguagcgaaacagcaggcuucgggccgucggcucguucacccgcccgaacaucaccgccgaagacuguacauccggccgcaggcuggcguugugcuucagccacuggggcgagaaacacggacccugggggccccagcggaggguggaugcggucgugaggccccgccggagcagggcccauagcuggcagucggccugguuuugcguggccgccucguaaaaccccaugaggggccggggcgccacggcguccgcggcggccgggggcccgcggcgcgucaggcgccauaggugccgaccgaguccgcgguccaccauacccgccuccucgaggaccacggccagggaacacagauaauccaggcgggcccagaggggaccgauggccagaggggcgcggacgccgcgcagcaacccgcgcagguggcgcucgaacgucucggcuaguauaugggagggcagcgcguuggggaucaccgacgccgaccacauagagucaagguccggggagucgggaucggcguccgggucgcgggcgugggugcccccaggagauagcggaaugucuggggucggaggcccugaggcgucagaaagugccggcgacgcggcccggggcuuuucgucugcggugucgguggcgugcugaucacgugggggguuaacgggcgaaugggagcucggguccacagcugaugucgucugggguggggggggcaggggacggaaggugguugucagcggaagacuguuagggcgggggcgcuugggggggcugucggggccacgagggguguccucggccagggcccagggacgcuuagucacggugcgucccggcggacaugcugggccuaccguggacuccauuuccgagacgacguggggggagcggugguugagcgcgccgccgggugaacgcugauucucacgacagcgcgugccgcgcgcacggguuggugugacacaggcgggacaccagcaccaggagaggcuuaagcucgggaggcagcgccaccgacgacaguaucgccuugugugugugcugguaauuuauacaccgauccguaaacgcgcgccgaaucuugggauugcggagguggcgccggaugcccucugggacgucauacgccaggccguggguguuggucucggccgaguugacaaacagggcugggugcagcacgcagcgauaggcgagcagggccagggcgaaguccggcgacagcugguuguuaaaauacugguaaccgggaaaccgggucacggguacgcccaggcucggggcgacguacacgcuaaccaccaacuccagcagcgucuggcccagggcguacaggucaaccgcuaacccgacgucgugcuucaggcggugguugguaaauucggcccguucguuguuaagguauuucaccaacagcuccgggggcugguuauacccgugacccaccagggugugaaaguuggcugugguuagggcggugggcaugccaaacauccggggggacuugagguccggcuccuggaggcaaaacugcccccgggcgaucguggaguuggaguugagggugacgaggcuaaagucggcgaggacggcccgccggagcgagacggcguccgaccgcagcaugacgaggauguuggcgcacuugauauccagguggcugaucccgcaggugguguuuaaaaacacaacggcgcgggccagcuccgugaagcacugguggagggccgucgagaccgagggguuuguugugcgcagggacgccaguuggccgauauacuuaccgagguccaugucguacgcggggaacacuaucugucguuguugcagcgagaacccgaggggcgcgaugaagccgcggauguugugggugcggccggcgcguagaacgcacuccccgaccaacagggucgcgaugagcucaacggcaaaccacuccuuuuccuuuauggucuuaacggcaagcuuauguucgcgaaucaguuggacgucaccguaucccccagaccccccgaagcuucgggccccggggaucucgagggucguguaguguagggcgggguugauggcgaacacggggcugcauagcuugcggaugcgcgugagggugaggaugugcgagggggacgaggggggugcgguuaacgccgccugggaucugcgcaggggcgggcgguucaguuuggccgccguaccgggcgucucgggggacgcgcggcgaugagacgagcggcucauucgccaucgggauagucccgcgcgaagccgcucgcggaggccggaucgguggcgggacccgugggaggagcgggagacggcggcguccuggagagaggggccgcuggggcgcccggaggccccguggggguuggaguguacguaggaugcgagccaauccuugaaggaccguuggcgugcaccuugggggcugagguuagcugccacaugaccagcaggucgcugucugcgggacucauccauccuucggccaggucgccgucuccccacagagaagcguuggucgcugcuuccucgaguugcuccuccugguccgcaagacgaucguccacggcguccaggcgcucaccaagcgccggaucgagguaccgucggugugcgguuagaaagucacgacgcgccgcuugcuccuccacgcgaauuuuaacacaggucgcgcgcugucgcaucaucucuaagcgcgcgcgggacuuuagccgcgccuccaauuccaagugggccgccuuugcagccauaaaggcgccaacaaaccgaggaucuugggugcugacgcccucccggugcagcugcagggucugguccuuguaaaucucggcucggaggugcgucucggccaggcgucggcgcagggccgcgugggcggcaucucgguccauuccgccacccugcgggcgacccggggggugcucugauagucucgcgugcccaaggcccgugaucgggguacuucgccgccgcgacccgccacccggugugcgcgauguuuggucagcagcuggcguccgacguccagcaguaccuggagcgccucgagaaacagaggcaacuuaaggugggcgcggacgaggcgucggcgggccucaccaugggcggcgaugcccuacgagugcccuuuuuagauuucgcgaccgcgacccccaagcgccaccagaccguggucccuggcgucgggacgcuccacgacugcugcgagcacucgccgcucuucucggccguggcgcggcggcugcuguuuaauagccuggugccggcgcaacuaaaggggcgugauuucgggggcgaccacacggccaagcuggaauuccuggcccccgaguugguacgggcgguggcgcgacugcgguuuaaggagugcgcgccggcggacguggugccucagcguaacgccuacuauagcguucugaauacguuucaggcccuccaccgcuccgaagccuuucgccagcuggugcacuuugugcgggacuuugcccagcugcucaaaaccuccuuccgggccuccagccucacggagaccacgggcccccccaaaaaacgggccaagguggacguggccacccacggccggacguacggcacgcuggagcuguuccaaaaaaugauccuuaugcacgccaccuacuuucuggccgccgugcuccucggggaccacgcggagcaggucaacacguuccugcgucucguguuugagaucccccuguuuagcgacgcggccgugcgccacuuccgccagcgcgccaccguguuucucgucccccggcgccacggcaagaccugguuucuggugccccucaucgcgcugucgcuggccuccuuucgggggaucaagaucggcuacacggcgcacauccgcaaggcgaccgagccgguguuugaggagaucgacgccugccugcggggcugguucgguucggcccgaguggaccacguuaaaggggaaaccaucuccuucucguuuccggacgggucgcgcaguaccaucguguuugccuccagccacaacacaaacguaaguccucuuuucuuucgcauggcucucccaaggggccccgggucgacccgacccacacccacccacccacauacacacacaaccagacgcgggaggaaagucugccccgugggcacugauuuuuauucgggaucgcuugaggaggcccgggcaacggcccgggcaacgguggggcaacucguagcaaauaggcgacugauguacgaagagaagacacacaggcgccacccggcgcuggucggggggauguuguccgcgccgcaccgucccccgacgaccucuugcagacgguccgugaugcaaggacggcggggggccugcagcagggugaccguauccacgggauggccaaagagaagcggacacaggcuagcaucccccuggaccgccaggguacacugggccaucuuggcccacagacacggggcgacgcagggacaggacuccguuacgacggaggagagccacagugcguuggcggaaucgauguggggcggcggggcgcaggacucgcagccccccgggugguuggugauccuggccaggagccaucccagauggcgggcccugcuucccgguggacagagcgaccccaggucgcuguccauggcccagcaguagaucuggccgcuggggaggugccaccaggcccccgggcccaaggcgcagcacgcgcccggcuccgggggggucuucgcggggaccagauacgcgccauccagcucgccgaccacuggcuccuccgcgagcuguucggugguugggucggggguuuccuccggggggguggccgcccguaugcgugcgaacgugagggugcacaggagcggggucagggggugcgucacgcuccggagguggacgaucgcgcaguagcggcgcucgcgguuaaagaaaaagagggcaaagaagguguucgggggcaaccgcagcgccuuggggcgcgucagauacagaaaaaucucgcagaagagggcgcgcccggggucuggguuaggaagggccaccugacacagaggcucggugaggaccguuagacaccgaaagaucuugagccgcucguccgcccgaacgacgcgccacacaaagacggaguugacaaugcgcgcgauagagucgacguccguccccaggucgucgacucuaucgcgcgugccgcgagcuccggcccgggaauccggccggggcaagguccccgggggaccaggcggcgccaggggccgccggggucccagcugcgccaugccgggggcggggggagggcaaaccccagaggcgggggccaacggcgcggggaggagugggugggcgagguggccgggggaaggcgcccgcuagcgagaccggccguucccggacgacaccuugcgacaaaaccuaaggacagcggcccgcgcgacgggguccgagaggcuaagguaggccgcgauguuaauggugaacgcaaagccgccgggaaagacaacuaugccacagaggcggcgauuaaaccccaggcagagguaggcguagcuuuccccgggcagguauugcucgcagacccugcguggggcuguggaggggacggccuccaugaagcgacauuuacucugcucgcguuuacugacgucaccauccaucgccacggcgauuggacgauuguuaagccgcagcgugucuccgcuugugcuguaguagucaaaaacguaauggccgucggagucggcaaagcgggccgggaggucgucgccgagcgggacgacccgccgcccccgaccgccccguccccccaggugugccaggacggccagggcauacgcggugugaaaaaaggcgucgggggcgguccccucgacggcgcgcaucagguucucgaggagaauggggaagcgccuggucaccucccccaaccacgcgcguuggucggggccaaagucauagcgcaggcgcugugagauucgcgggccgcccugaagcgcggcccggauggccuggcccagggcccggaggcacgccagauguaugcgcgcgguaaaggcgaccucggcggcgaugucaaagggcggcaggacggggcgcggguggcgcaggggcaccucgagcgcgggaaagcguagcagcagcuccgccugcccagcgggagacagcuggugggggcgcacgacgcguucugcggcgcaggccucggucagggccguggccagcgccgaggacagcagcggagggcgggcgcgucgcccgccccacgccacggaguucucguaggagacgacgacgaagcgcugcuugguuccguagugguggcgcaggaccacggagauagaacgacggcuccacagccaguccggccggucgccgccggccagggcuucccauccgcgauccaaccacucgaccagcgaccgcggcuuugcgguaccagggguaaggguuagaacgucguucaggauguccucgcccccgggcccguggggcgcuggggccacaaagcggcccccgccggggggcuccagacccgccagcaccgcaucugcgucagccgcccccauggcgcccccgcugacggccuggugaaccagggcgcccuggcguagccccgaugcaacgccacaggccgcacgcccgguccgcgcucggaccggguggcggcgggugacguccugcacugcccgcugaaccaacgcgaggaucuccucguucuccugugcgauggacacguccugggccgcggucgugucgccgccgggggccgucagcugcuccuccggggagaugggggggucggacgccccgacgaugggcgggucugcgggcgcccccgcguggggccgggccaagggcugcggacgcggggacgcgcuuucccccagacccauggacaggugggccgcagccuccuucgcggccggcggggcggcggcgccaagcagagcgacguagcggcacaaaugccgacagacgcgcaugaugcgcgugcugucggccgcguagcgcguguugggggggacgagcucgucguaacuaaacagaaucacgcgggcacagcucgcccccgagccccacgcaaggcgcagcgccgccacggcguacgggucauagacgcccugcgcgucacacaccacgggcagggagacgaacaaccccccggcgcuggacgcacgcggaaggaggccagggugugccggcacgacgggggccagaagcucccccaccgcauccgcgggcacguaggcggcaaacgccgugcaccacgggguacagucgccgguggcaugagcccgagucuggauuucgaccuggaaguuugcggccgucccgaguccggggcggccgcgcaucagggcggccagagggauucccgcggccgccaggcacucgcuggauaugaugacgugaaccaaagaccgagggccgacccgggccguggccgagaucgucuggaccucguuggccaagugcgcguucaugguucggggguggguguggguguguaggcgaugcgggucccccgaguccgcgggaagggcguggguuuggcgcgcguaugcguauucgccaacggaggcgugcgugcuuaugcgcggcgcguuucuucugucucuagggaauccgaggccaggacuuuaaccugcucuuugucgacgaggccaacuuuauucgcccggaugcgguccagacgauuaugggcuuucucaaccaggccaacugcaagauuaucuucgugucguccaccaacaccgggaaggccaguacgagcuuuuuguacaaccuccgcggggccgcagacgagcuucucaacguggugaccuauauaugcgaugaucacaugccgaggguggugacgcacacaaacgccacggccuguucuuguuauauccucaacaagcccguuuucaucacgauggacggggcgguucgccggaccgccgauuuguuucuggccgauuccuucaugcaggagaucaucgggggccaggccagggagaccggcgacgaccggcccguucugaccaagucugcgggggagcgguuucuguuguaccgccccucgaccaccaccaacagcggccucauggcccccgauuuguacguguacguggaucccgcguucacggccaacacccgagccuccgggaccggcgucgcugucgucgggcgguaccgcgacgauuauaucaucuucgcccuggagcacuuuuuucuccgcgcgcucacgggcucggcccccgccgacaucgcccgcugcgucguccacagucugacgcagguccuggcccugcaucccggggcguuucgcggcguccggguggcggucgagggaaauagcagccaggacucggccgucgccaucgccacgcacgugcacacagagaugcaccgccuacuggccucggagggggccgacgcgggcucgggccccgagcuucucuucuaccacugcgagccucccgggagcgcggugcuguaccccuuuuuccugcucaacaaacagaagacgcccgccuuugaacacuuuauuaaaaaguuuaacuccgggggcgucauggccucccaggagaucguuuccgcgacggugcgccugcagaccgacccggucgaguaucugcucgagcagcuaaauaaccucaccgaaaccgucucccccaacacugacguccguacguauuccggaaaacggaacggcgccucggaugaccuuauggucgccgucauuauggccaucuaccucgcggcccaggccggaccuccgcacacauucgcuccuaucacacgcgucucgugagcgcccaauaaacacacccagguaugcuacgcacgaccacggugucgucuguuaaggggggggggggaaggggguguuggcgggaagcgugggaacacgggggauucucucacgaccggcaccaguaccaccccccugugaacacagaaaccccaacccaaaucccauaaacauacgacacacaggcauauuuuggaauuucuuagguuuuuauuuauuuagguaugcugggguuucucccuggaugcccacccccacccccccgugggucuagccgggccuuagggauagcguauaacgggggccaugucuccggaccgcacaacggccgcgccgucaaaggugcacacccgaaccacgggagccagggccaaggugucuccuaguuggcccgcgugggucagccaggcgacgagcgccucguaaagcggcagccuucgcucuccauccugcaucagggccggggcuucggggugaaugagcugggcggccucccgcgugacacucugcaucugcaguagagcguucacguacccguccugggcacuuagcgcaaagagccgggggauuagcguaaggaugauggugguucccuccgugaucgaguaaaccauguuaaggaccagcgaucgcagcucggcguuuacgggaccgaguuguuggacguccgccagcagcgagaggcgacucccguuguaguacagcacguugaggucuggcagcccuccgggguuucuggggcugggguucaggucccggaugccccuggccacgagccgcgccacgauuucgcgcgccaggggcgauggaagcggaacgggaaaccgcaacgugagguccagcgaauccaggcgcacguccgucgcuuggcccucgaacacgggcgggacgaggcugaugggguccccguuacagagaucuacgggggagguguugcgaagguuaacggugccggcgugggugaggcccacguccagggggcaggcgacgauucgcgugggaagcacccgggugaugaccgcggggaagcgccuucgguacgccagcaacaaccccaacgugucgggacugacgccuccggagacgaaggauucgugcgccacgucggccagcgucaguugccggcggauggucggcaggaauaccacccgcccuucgcagcgcugcagcgccgccgcaucggggcgcgagaugcccgaggguaucgcgaugucaguuucaaagccguccgccagcauggcgccgauccacgcggcagggagugcaguggugguucggguggcgggaggagcgcggugggggucagcggcguagcagagacgggcgaccaaccucgcauaggacggggggugggucuuaggggguugggaggcgacagggaccccagagcaugcgcggggaggucugucgggcccagacgcaccgagagcgaauccguccgcggagucccggcuuggguuuuauggggcccggcccucggaaucgcggcuugucggcggggacaaagggggcggggcuaggggcuugcggaaacagaagacgcgugggauaaaagaaucgcacuaccccaaggaagggcggggcgguuuauuacagagccagucccuugagcggggaugcgucauagacgagauacugcgcgaagugggucucccgcgcgugggcuuccccguugcgggcacugcggaggagggcggggucgcuggcgcaggugagcggguaggccuccugaaacaggccacacggguccuccacgaguucgcggcaccccggggggcgcuuaaacuguacgucgcuggcggcgguggccguggacaccgccgaacccgucuccacgaucaggcgcuccaggcagcgauguuuggcggcgaugucggccgacguaaagaacuuaaagcaggggcugagcaccggcgaggccccguugaggugguaggccccguuauagagcagguccccguacgaaaaucgcugcgacgcccacggguuggccguggccgcgaaggcccgggacgggucgcucuggccguggucguacaugagggcggugacaucccccuccuugucccccgcguaaacgcccccggcggcgcguccccggggguugcagggccggcggaaguaguugacgucggucgacacggggguggcgauaaacucacacacggcguccuggccgugguccaucccugcgcgccgcggcaccugggcgcacccgaacacggggacgggcugggccggccccaggcgguuucccgccacgaccgcguuccgcagguacacggcugccgcguuguccaggagagggggagccccgcggcccagguaaaaguuuuggggaagguugcccaugucggugacgggguugcggacgguugccguggccacgacggcgguguagcccacgcccagguccacguucgcgcgcggcugggugagcgugaaguuuacccccccgccaguuucgugccgggccaccuggagcuggcccaggaaguacgccuccgacgcgcgcuccgagaacagcacguucucagucacaaagcgguccugucggacgacggugaacccaaacccgggauggaggcccgucuugagcugaugaugcaaggccacgggacugaucuugaaguaccccgccaugagcgcguaggucagcgcguucuccccggccgcgcucucgcggacgugcugcacgacgggcugucggaucgacgaaaaguaguuggcccccagagccggggggaccagggggaccugccgcgacaggucgcgcagggccggggggaaauugggcgcguucgccacguggucggccccggcgaacagcgcguggacggggaggggguaaaaauagucgccauuuuggaugguaugguccagaugcuggggggccaucagcaggauuccggcgugcaacgccccgucgaauaugcgcauguuggugguggacgcgguguuggcgcccgcgucgggcgccgccgagcagagcagcgccguugugcguucggccauguugugggccagcaccugcagcgugagcauggcgggcccguccacuaccacgcgcccguugugaaacauggcguugaccguguuggccaccagauuggccgggugcagggggugcgcgggguccgucacggggucgcuggggcacuccucgccgggggcgaucuccgggaccaccauguucugcaggguggcguauacgcggucgaagcgaacccccgcggugcagcagcggccccgcgagaaggcgggcaccaucacguaguaguaaaucuuguggugcacgguccaguccgccccccggugcggccggucauccgcggcguccgcggcucgggccuggguguugugcagcagcuggccgucguugcgguugaaguccgcggucgccacguuacaugccgccgcguacacggggucguggccccccgcgcuaacccggcagucgcgauggcgguccagggccgcgcgccgcaucagggcgucacagucccacacgagggguggcagcagcgccgggucucgcauuaggugauucagcucggcuugcgccugcccgcccagcuccgggccggucaggguaaagucaucaaccagcugggccagggccucgacgugcgccaccaggucccgguacacggccaugcacuccucgggaaggucucccccgagguaggucacgacguacgagaccagcgaguagucguucacgaacgccgcgcaccgcguguuguuccaguagcuggugaugcacuggaccacgagccgggccagggcgcagaagacgugcucgcugccguguauggcggccugcagcagguaaaacaccgccggguaguugcggucgucgaacgccccgcgaacggcggcgaugguggcgggggccauggcguggcgucccacccccagcuccaggccccgggcgucccggaacgccgccggacauagcgccaggggcaaguugccguucaccacgcgccagguggccuggaucucccccgggccggccgggggaacguccccccccggcagcuccacgucggccacccccacaaagaagucgaacgcggggugcagcucaagagccagguuggcguugucgggcugcauaaacugcuccggggucaucuggccuuccgcgacccaucggacccgcccgugggccaggcgcugcccccaggcguucaaaaacagcugcugcaugucugcggcggggccggccggggccgccacguacgccccguacggauuggcggcuucgacggggucgcgguuaaggcccccgaccgccgcgucaacguucaucagcgaaggguggcacacggucccgaucgcguguuccagagacaggcgcagcaccuggcgguccuucccccaaaaaaacagcuggcggggcgggaaggcgcggggauccggguggccgggggcggggacuagguccccggcgugcgcggcaaaccguuccaugaccggauugaacaggcccaggggcaggacgaacgucagguccauggcgcccaccaggggguagggaacguugguggcggcguagaugcgcuucuccagggccuccagaaagaccagcuucucgccgauggacaccagauccgcgcgcacgcgcgucgucuggggggcgcucucgagcucguccagcgucugccgguucaggucgagcugcuccuccugcaucuccagcagguggcggcccacgucguccagacuucgcacggccuugcccaucacgagcgccgugaccagguuggccccguucaggaccaucucgccguacgucaccggcacgucggcuucgguguccuccacuuucaggaaggacugcaggaggcgcuguuugaucggggcgguggugacgagcaccccgucgaccggccgcccgcgcgugucggcaugcgucagacggggcacggccacggagggcugcguggccguggugagguccacgagccaggccucgacggccucccggcgguggcccgccuugcccaggaaaaagcucgucucgcagaagcuucgcuuuagcucggcgaccagggucgcccgggccacccugguggccaggcggccguuguccagguaucguugcaucggcaacaacaaagccaggggcggcgccuuuuccagcagcacgugcagcaucuggucggccgugccgcgcucaaacgccccgaggacggccuggacguugcgagcgagcuguuggauggcgcgcaacuggcgaugcgcgccgauacccgucccguccagggccucccccgugagcagggcgauggccucgguggccaggcugaaggcggcguucagggcccggcggucgauaaucuuggucauguaauuguguguggguugcucgauggggugcgggccgucgcgggcaaucagcggcugguggaccucgaacuguacgcgccccucguucauguaggccagcuccggaaacuugguacacacgcacgccaccgacaacccgagcuccagaaagcgcacgagcgacaggguguugcaauacgaccccagcagggcgucgaacucgacgucguacaggcuguuugcaucggagcgcacgcgggaaaaaaaaucaaacaggcgucgaugcgacgccaccucgaucgugcuaaggagggacccggucggcaccauggccgcggcauaccgguaucccggagggucgcgguugggagcggccauggggucgcguggagaucggcugucucuagcgauauuggcccggggaggcuaagauccaccccaacgcccggccacccguguacgugcccgacggcccaagguccaccgaaagacacgacgggcccggacccaaaaaggcgggggaugcugugugagaggccgggugccggucgggggggaaaggcaccgggagaaggcugcggccucguuccaggagaacccaguguccccaacagacccggggacgugggaucccaggccuuauauacccccccccccgccccacccccguuagaacgcgacgggugcauucaagauggcccugguccaaaagcgugccaggaagaaauuggcagaggcggcaaagcuguccgccgccgccacccacaucgaggccccggccgcgcaggcuauccccagggcccgugugcgcaggggaucggugggcggcagcauuugguugguggcgauaaaguggaaaagcccguccggacugaaggucucgugggcggcggcgaacaaggcacacagggccgugccucccaaaaacacggacaucccccaaaacacgggcgccgacaacggcagacgaucccucuugauguuaacguacaggaggagcgcccgcaccgcccacguaacguaguagccgacgauggcggccaggauacaggccggcgccaccacccuuccggucagcccguaauacaugcccgcugccaccaucuccaacggcuucaggaccaaaaacgaccaaaggaacagaaucacgcgcuuugaaaagaccggcuggguauggggcggaagacgcgaguaugccgaacugacaaaaaaaucagaggugccguacgaggacaaugaaaacuguuccuccagcggcaguucucccuccucccccccgaaggcggccucgucgaccagaucucgauccaccagaggaaggucaucccgcauggucauggggugugcgguggagguggggagaccgaaaccgcaaagggucgcuuacgucagcaggaucccgagaucaaagacacccggguucuugcacaaacaccacccggguugcauccgcggaggcgaguguuuugauaaggccguuccgcgccuugauauaaccuuugauguugaccacaaaacccggaauuuacgccuacgccccaaugcccacgcaagaugagguagguaacccccccgugggugugacguugcguuuaguucauuggaggccaaggggaaaaaugggguggggaggaaacggaaaacccaguaggccgugucgggaacacgcccgggguuguccucaaaaggcaggguccauacuacggaagccgucguuguauucgagaccugccugugcaacgcacgucgggguugccuguguccgguucggcccccaccgcgugcggcacgcacgaggacgaguccgcgugcuuuauuggcguuccaagcguugcccuccaguuucuguugucgguguucccccauacccacgcccacauccaccguagggggccucugggccguguuacgucgccgcccgcgauggagcuuagcuacgccaccaccaugcacuaccgggacguuguguuuuacgucacaacggaccgaaaccgggccuacuuugugugcgggggguguguuuauuccguggggcggccgugugccucgcagcccggggagauugccaaguuuggucuggucguucgagggacaggcccagacgaccgcguggucgccaacuauguacgaagcgagcuccgacaacgcggccugcaggacgugcgucccauuggggaggacgagguguuucuggacagcgugugucuucuaaacccgaacgugagcuccgagcuggaugugauuaacacgaacgacguggaagugcuggacgaaugucuggccgaguacugcaccucgcugcgaaccagcccgggugugcuaauauccgggcugcgcgugcgggcgcaggacagaaucaucgaguuguuugaacacccaacgauagucaacguuuccucgcacuuuguguauaccccguccccauacguguucgcccuggcccaggcgcaccucccccggcucccgagcucgcuggaggcccuggugagcggccuguuugacggcauccccgccccacgccagccacuugacgcccacaacccgcgcacggaugugguuaucacgggccgccgcgccccacgacccaucgccgggucgggggcggggucggggggcgcgggcgccaagcgggccaccgucagcgaguucgugcaagucaaacacauugaccgcgugggccccgcuggcguuucgccggcgccuccgccaaacaacaccgacucgaguucccuggugcccggggcccaggauuccgccccgcccggccccacgcuaagggagcugugguggguguuuuaugccgcagaccgggcgcuggaggagccccgcgccgacucuggccucacccgcgaggagguacgugccguacguggguuccgggagcaggcguggaaacuguuuggcuccgcgggggccccgcgggcguuuaucggggccgcguugggccugagcccccuccaaaagcuagccguuuacuacuauaucauccaccgagagaggcgccugucccccuuccccgcgcuaguccggcucguaggccgguacacacagcgccacggccuguacgucccucggcccgacgacccagucuuggccgaugccaucaacgggcuguuucgcgacgcgcuggcggccggaaccacagccgagcagcuccucauguucgaccuucuccccccaaaggacgugccggugggaagcgacgugcaggccgacagcaccgcucugcugcgcuuuauagaaucgcaacgucucgccguccccgggggggugaucucccccgagcacgucgcguaccuuggugcguuccugagcgugcuguacgcuggccgcgggcgcauguccgcagccacgcacaccgcgcggcugacaggggugaccucccuggugcuagcggugggugacguggaccgucuuuccgcguuugaccgcggagcggcgggcgcggccagccgcacgcgggccgccggguaccuggaugugcuucuuaccguucgucucgcucgcucccaacacggacagucuguguaaaagaccccaauaaacguauaucgcuacuacacccuugugugucaauggacgccucuccgggggggggggagggaaagcaaagaggggcugggggagcggcaccaccggggccugaacaaacaaaccacagacacgguuacaguuuauucggucgggcggagaaacggccgaagccacgcccacuuuauucgcgucuccaaaaaaacgggacacuuguccggagaaccuuuaggaugccagccagggcggcgguaaucauaaccacgcccagcgcagaggcggccagaaacccgggcgcaauugcggccacgggcugcgugucaaaggcuagcaaaugaaugacgguuccguuuggaaauagcaacaaggccguggacggcacgucgcucgaaaacacgcuuggggcgcccuccgucggcccggcggcgauuugcugcuguguguuguccguauccaccagcaacacagacaugaccuccccggccgggguguagcgcauaaacacggcccccacgagccccaggucgcgcugguuuugggugcgcaccagccgcuuggacucgauaucccggguggagccuucgcaugucgcggugagguagguuaggaacagugggcgucggacgucgacgccggugagcuuguagccgaucccccggggcagaggggagugggugacgacguagcuggcguugugggugauggguaccaggauccguggcucgacguuggcagacugccccccgcaccgaugugaggccucagggacgaaggcgcggaucagggcguuguagugugcccaacgcgucagggucgaggcgaggccgugggucugcugggccaggacuucgaccggggucucggaucggguggcuugagccagcgcguccaggauaaacacgcucucgucuagaucaaagcgcagggaggccgcgcauggcgaaaagugguccggaagccaaaagaggguuuucugguggucggcccgggccagcgcgguccggaggucggcguuggucgcugcggcgacgucggacguacacagggccgaggcuaucagaaggcuccggcgggcgcguucccgcugcaccgccgaggggacgccagccaagaacggcugccggaggacagccgaggcguaaaauagcgcccgguggacgaccgggguggucagcacgcggcccccuagaaacucggcauacagggcgucgaugagaugggcugcgcugggcgccacugcgucguacgccgaggggcuauccagcacgaaggccagcugauagcccagcgcguguaaugccaagcucuguucgcgcuccagaaucucggccaccaggugcuggagccgagccucuagcugcaggcgggccgugggauccaagacugacacauuaaaaaacacagaauccgcggcacagcccgcggccccgcgggcggccaacccggcaagcgcgcgcgagugggccaaaaagccuagcaggucggagaggcagaccgcgccguuugcgugggcggcguucacgaaagcaaaacccgacgucgcgagcagccccguuaggcgccagaagagaggggggcgcgggcccugcucggcgcccgcgucccccgagaaaaacuccgcguaugcccgcgacaggaacugggcguaguucgugcccuccuccggguagccgcccacgcggcggagggcguccagcgcggagccguugucggcccgcgucagggacccuaggacaaagacccgauaccgggggccgcccgggggcccgggaagagcccccgggggguuuucguccgcgggguccccgacccgaucuagcgucuggcccgcggggaccaccaucacuuccaccggagggcugucgugcauggauaucacgagccccaugaauucccgcccguagcgcgcgcgcaccagcgcggcaucgcacccgagcaccagcucccccgucguccagaugcccacgggccacgucgaggccgacggggagaaauacacguaccuaccuggggaucucaacaggccccggguggccaaccaggucguggacgcguugugcaggugcgugauguccagcuccgucgucgggugccgccgggccccaaccggcggucgggggggcgguguaucacgcggcccgcucggguggcucgccgucgccacguugucuccccgcgggaacgucagggccucggggucagggacggccgaaaacguuacccaggcccgggaacgcagcaacacggaggcggcuggauugugcaagagacccuuaaggggggcgaccgaggggggaggcugggcggucggcucgaccguggugggggcgggcaggcucgcguucgggggccggccgagcagguaggucuucgggauguaaagcagcuggccggggucccgcggaaacucggccguggugaccaauacaaaacaaaagcgcuccucguaccagcgaagaaggggcagagaugccguagucagguuuaguucguccggcggcgccagaaauccgcgcggugguuuuugggggucggggguguuuggcagccacagacgcccgguguucgugucgcgccaguacaugcgguccaugcccaggccauccaaaaaccaugggucugucugcucaguccagucguggaccugaccccacgcaacgcccaaaauaauaacccccacgaaccauaaaccauuccccaugggggaccccgucccuaacccacggggcccguggcuauggcagggcuugccgccccgacguuggcugcgagcccugggccuucacccgaacuuggggguugggguggggaaaaggaagaaacgcgggcguauuggucccaauggggucucggugggguaucgacagagugccagcccugggaccgaaccccgcguuuaugaacaaacgacccaacacccgugcguuuuauucugucuuuuuauugccgucauagcgcggguuccuuccgguauugucuccuuccguguuucaguuagccucccccaucucccgggcaaacgugcgcgccaggucgcagaucgucgguauggagccugggguggugacgugggucuggaccaucccggagguaaguugcagcagggcgucccggcagccggcgggcgauuggucguaauccaggauaaagacaugcaugggacggaggcguuuggccaagacguccaaagcccaggcaaacacguuauacaggucgccguugggggccagcaacucgggggcccgaaacaggguaaauaacguguccccgauauggggucgugggcccgcguugcucuggggcucggcacccuggggcggcacggccgcccccgaaagcuguccccaauccucccgccacgacccgccgcccugcagauaccgcaccguauuggcaagcagcccauaaacgcggcgaaucgcggccagcauagccaggucaagccgcucgccggggcgcuggcguuuggccaggcggucgaugugucuguccuccggaagggcccccaacacgauguuugugccgggcaaggucggcgggaugagggccacgaacgccagcacggccuggggggucaugcugcccauaagguaucgcgcggccggguagcacaggagggcggcgaugggauggcggucgaagaugagggugagggccgggggcggggcaugugagcucccagccucccccccgauaugaggagccagaacggcgucggucacggcauaaggcaugcccauuguuaucugggcgcuugucauuaccaccgccgcguccccggccgauaucucacccuggucgaggcgguguugugugguguagauguucgcgauugucucggaagcccccaacacccgccaguaagucaucggcucggguacguagacgauaucgucgcgcgaacccagggccaccagcaguugcgugguggugguuuuccccaucccguggggaccgucuauauaaacccgcaguagcgugggcauuuucugcuccaggcggacuuccguggcuuuuuguugccggcgagggcgcaacgccguacgucgguuguuauggccgcgagaacgcgcagccuggucgaacgcagacgcguguugauggcagggguacgaagccauacgcgcuucuacaaggcgcuggccgaagaggugcgggaguuucacgccaccaagaucugcggcacgcuguugacgcuguuaagcgggucgcugcagggucgcucgguauucgaggccacacgcgucaccuuaauaugcgaaguggaccugggaccgcgccgccccgacugcaucugcguguucgaauucgccaaugacaagacgcugggcgggguuugugucaucauagaacuaaagacaugcaaauauauuucuuccggggacaccgccagcaaacgcgagcaacgggccacggggaugaagcagcugcgccacucccugaagcuccugcagucccucgcgccuccgggugacaagauaguguaccugugccccguccugguguuugucgcccaacggacgcuccgcgucagccgcgugacccggcucgucccgcagaaggucuccgguaauaucaccgcagucgugcggaugcuccagagccuguccacguauacgguccccauugagccuaggacccagcgagcccgucgccgccgcggcggcgccgcccgggggucugcgagcagaccgaaaaggucacacucuggggcgcgcgacccgcccgagucagcggcccgccaguuaccacccgccgaccaaacccccaccuccacggagggcgggggggugcuuaagaggaucgcggcgcucuucugcgugcccguggccaccaagaccaaaccccgagccgccuccgaaugagaguguuucguuccuucccccuccccccgcgucagacaaacccuaaccaccgcuuaagcggcccccgcgagguccgaagacucauuuggauccggcgggagccacccgacaacagcccccggguuuucccacgccagacgccgguccgcugugccaucgcgcccccucaucccaccccccaucuuguccccaaauaaaacaaggucugguaguuaggacaacgaccgcaguucucguguguuauuuucgcucuccgccucucgcagauggacccguacugcccauuugacgcucuggacgucugggaacacaggcgcuucauagucgccgauucccgaaacuucaucacccccgaguucccccgggacuuuuggaugucgcccgucuuuaaccucccccgggagacggcggcggagcagguggucguccuacaggcccagcgcacagcggcugccgcugcccuggagaacgccgccaugcaggcggccgagcuccccgucgauaucgagcgccgguuacgcccgaucgaacggaacgugcacgagaucgcaggcgcccuggaggcgcuggagacggcggcggccgccgccgaagaggcggaugccgcgcgcggggaugagccggcgggugggggcgacgggggggcgcccccgggucuggccgucgcggagauggagguccagaucgugcgcaacgacccgccgcuacgauacgacaccaaccuccccguggaucugcuacacaugguguacgcgggccgcggggcgaccggcucgucgggggugguguucgggaccugguaccgcacuauccaggaccgcaccaucacggacuuuccccugaccacccgcagugccgacuuucgggacggccguauguccaagaccuucaugacggcgcugguacugucccugcaggcgugcggccggcuguaugugggccagcgccacuauuccgccuucgagugcgccguguugugucucuaccugcuguaccgaaacacgcacggggccgccgacgauagcgaccgcgcuccggucacguucggggaucugcugggccggcugccccgcuaccuggcgugccuggccgcggugaucgggaccgagggcggccggccacaguaccgcuaccgcgacgacaagcuccccaagacgcaguucgcggccggcgggggccgcuacgaacacggagcgcuggcgucgcacaucgugaucgccacgcugaugcaccacggggugcucccggcggccccgggggacgucccccgggacgcgaguacccacguuaaccccgacggcguggcgcaccacgacgacauaaaccgcgccgccgccgcguuccucagccggggccacaaccuauuccugugggaggaccagacucugcugcgggcaaccgcgaacaccauaacggcccugggcguuauccagcggcuccucgcgaacggcaacguguacgcggaccgccucaacaaccgccugcagcugggcaugcugauccccggagccgucccuucggaggccaucgcccguggggccuccggguccgacucgggggccaucaagagcggagacaacaaucuggaggcgcuaugugccaauuacgugcuuccgcuguaccgggccgacccggcggucgagcugacccagcuguuucccggccuggccgcccugugucuugacgcccaggcggggcggccggucgggucgacgcggcgggugguggauaugucaucgggggcccgccaggcggcgcuggugcgccucaccgcccuggaacucaucaaccgcacccgcacaaaccccaccccugugggggagguuauccacgcccacgacgcccuggcgauccaauacgaacaggggcuuggccugcuggcgcagcaggcacgcauuggcuugggcuccaacaccaagcguuucuccgcguucaacguuagcagcgacuacgacauguuguacuuuuuaugucugggguucauuccacaguaccugucggcgguuuaguggguggugggcgaggggggagggggcauuagggagaaaaaacaagagccuccguuggguuuucuuugugccuguacucaaaaggucauaccccguaaacggcgggcuccagucccggcccggcgguuggcgugaacgcaacggcgggagcuggguuagcguuuaguuuagcauucgcucucgccuuuccgcccgccccccgaccguugcgccuuuuuuuuuuucguccaccaaagucucugugggugcgcgcauggcagccgaugccccgggagaccggauggaggagccccugcccgacagggccgugcccauuuacguggcuggguuuuuggcccuguaugacagcggggacucgggcgaguuggcauuggauccggauacggugcgggcggcccugccuccggauaacccacucccgauuaacguggaccaccgcgcuggcugcgagguggggcgggugcuggccguggucgacgacccccgcgggccguuuuuuguggggcugaucgccugcgugcagcuggagcgcguccucgagacggccgccagcgcugcgauuuucgagcgccgcgggccgccgcucucccgggaggagcgccuguuguaccugaucaccaacuaccugcccucggucucccuggccacaaaacgccuggggggcgaggcgcaccccgaucgcacgcuguucgcgcacgucgcgcugugcgcgaucgggcggcgccucggcacuaucgucaccuacgacaccggucucgacgccgccaucgcgcccuuucgccaccugucgccggcgucucgcgagggggcgcggcgacuggccgccgaggccgagcucgcgcuguccgggcgcaccugggcgcccggcguggaggcgcugacccacacgcugcuuuccaccgccguuaacaacaugaugcugcgggaccgcuggagccugguggccgagcggcggcggcaggccgggaucgccggacacaccuaccuccaggcgagcgaaaaauucaaaauguggggggcggagccuguuuccgcgccggcgcgcggguauaagaacggggccccggaguccacggacauaccgcccggcucgaucgcugccgcgccgcagggugaccggugcccaaucguccgucagcgcggggucgccuuguccccgguacugccccccaugaaccccguuccgacaucgggcaccccggcccccgcgccgcccggcgacgggagcuaccuguggaucccggccucccauuacaaccagcucgucgccggccaugccgcgccccaaccccagccgcauuccgcguuugguuucccggcugcggcgggguccguggccuaugggccucacggugcgggucuuucccagcauuacccuccccacgucgcccaucaguaucccggggugcuguucucgggacccagcccacucgaggcgcagauagccgcguuggugggggccauagccgcggaccgccaggcgggcggucagccggccgcgggagacccugggguccgggggucgggaaagcgucgccgguacgaggcggggccgucggaguccuacugcgaccaggacgaaccggacgcggacuacccguacuaccccggggaggcucgaggcgcgccgcgcggggucgacucccggcgcgcggcccgccauucucccgggaccaacgagaccaucacggcgcugaugggggcggugacgucucugcagcaggaacuggcgcacaugcgggcucggaccagcgcccccuauggaauguacacgccgguggcgcacuaucgcccucaggugggggagccggaaccaacaacgacccacccggcccuuugucccccggaggccguguaucgccccccaccacacagcgcccccuacgguccuccccaggguccggcgucccaugcccccacucccccguaugccccagcugccugcccgccaggcccgccaccgcccccauguccuuccacccagacgcgcgccccucuaccgacggagcccgcguucccccccgccgccaccggaucccaaccggaggcauccaacgcggaggccggggcccuugucaacgccagcagcgcagcacacguggacguugacacggcccgcgccgccgauuuguucgucucucagaugaugggggcccgcugauucgccccggucuuugguaccaugggaugucuuacuguauaucuuuuuaaauaaaccagguaauaccaaauaagacccauugguguauguucuuuuuuuauugggaggcgcggguaggcggguagcuuuacaaugcaaaagccuucgacguggaggaaggcguggggggggggggaaucggcacugaccaaggggguccguuuugucacgggaaaggaaagaggaaacaggccgcggacacccgggggaguuuguguucccuuuucuuucuucccacacacacaaaaggcguaccaaacaaacaaaccaaaagaugcacaugcgguuuaacacccgugguuuuuauuuacaacaaaccccccaucacaggucguccucgucggcgucaccgucuuuguugggaacuuggguguaguugguguugcggcgcuugcgcaugaccaugucggugaccuuggcgcugagcagcgcgcucgugcccuucuucuuggccuuguguuccgugcgcuccauggcagacaccagggccauguaccguaucaucucccgggccucggcuagcuuggccucgucaaagucgccgcccuccucgcccuccccggacgcguccggguuggugggguucuugagcuccuuggugguuagcggguacagggccuucaugggguugcucugcagccgcaugacguagcgaaaggcgaagaaggccgccgccaggccggccaggaccaacagacccacggccagcgccccaaagggguuggacaugaaggaggacacgcccgacacggccgauaccacgccgcccacgaugcccaucaccaccuugccgaccgcgcgccccaggucgcccauccccucgaagaacgcgcccaggcccgcaaacauggcggcguuggcgucggcguggaugaccgugucgaugucggcgaagcgcaggucgugcagcugguugcggcgcuggaccuccguguaguccagcaggccgcuguccuugaucucguggcggguguacaccuccagggggacaaacucgugauccuccagcauggugauguugaggucgaugaaggugcugacgguggugaugucggcgcggcucagcuggugggaguacgcguacuccucgaaguacacguagcccccaccgaaggugaaguagcgccggugucccacggugcacggcucgaucgcaucgcgcgucagccgcagcucguuguucucccccagcugccccucgaccaacgggcccuggucuucguaccgaaagcugaccagggggcggcuguagcaggccccgggccgcgagcugaugcgcaucgaguuuuggacgaucacguuguccgcggcgaccggcacgcacguggagacggccaucacgucgccgagcauccgcgcgcucacccgccggcccacgguggccgaggcgauggcguugggguucagcuugcgggccucguuccacagggucagcucgugauucugcagcucgcaccacgcgauggcaacgcggcccaacauaucguugacauggcgcuguaugugguuguacguaaacugcagccuggcgaacucgauggaggagguggucuugaugcgcuccacggacgcguuggcgcuggccccgggcggcgggggcgugggguuugggggcuugcggcucugcucgcggagguguucccgcacguacagcuccgcgagcguguugcugagaaggggcugguacgcgaucagaaagcccccauuggccagguaguacugcggcuggcccaccuugaugugcgucgcguuguaccugcgggcgaagaugcgguccauggcgucgcgggcguccuugccgaugcagucccccagguccacgcgcgagagcggguacucggucagguugguggugaaggugguggauauggcgucggaagagaaucggaaggagccgccguacucggagcgcagcaucucguccaccuccugccacuuggucauggugcagaccgacgggcgcuuuggcacccagucccaggccacggugaacuugggggucgugagcagguuccggguggucggcgccguggcccgggccuugguggugaggucgcgcgcguagaagccgucgaccugcuugaagcggucggcggcguagcugguguguucggugugcgaccccucccgguagccguaaaacggggacauguacacaaagucgccagucgccaacacaaacucgucguacggguacaccgagcgcgcguccaccuccucgacgaugcaguuuaccgucgucccguaccgguggaacgccuccacccgcgagggguuguacuugaggucgguggugugccagccccggcucgugcgggucgcggcguuggccgguuucagcuccaugucggucucguggucgucccggugaaacgcgguggucuccagguuguugcgcacguacuuggccguggaccgacagacccccuuggcguugaucuugucgaucaccuccucgaaggggacgggggcgcgguccucaaagauccccauaaacugggaguagcgguggccgaaccacaccugcgaaacggugacgucuuuguaguacaugguggccuugaacuuguacggggcgauguucuccuugaagaccaccgcgaugcccuccguguaguucugacccucgggccgggucgggcagcggcgcggcugcucgaacugcaccaccguggcgcccguggggggugggcacacguaaaaguuugcaucgguguucuccgccuugaugucccgcaggugcucgcgcaggguggcguggcccgcggcgacggucgcguugucgccggcggggcgcggcggcuuuggggguuucgguuuucuguucuucuucgguuucgggucccccguugggggggcgccaggggcgggcggcgccggaguggcagggcccccguucgccgccugggucgcggccgcgaccccaggcgugccgggggaacucggagccgccgacgccaccaggacccccagcgucaaccccaagagcgcccauacgacgaaccaccggcgcccccgcgcgggggcgcccuggcgcauggcgggacuacgggggcccgucgugccccccgucagguagccugggggcgaggugcuggaggaccgaguagaggaucgagaaaacgucucggucguagaccacgaccgaccgggggccgauacagccgucgggggcgcucucgacgauggccaccagcggacagucggagucguacgugagauauacgccgggcggguaacgguaacgaccuucggaggucgggcggcugcaguccgggcggcgcaacucgagcuccccgcaccgguagaccgaggcaaagagugugguggcgauaaucagcucgcgaauauaucgccaggcggcgcgcugagugggcguuauuccggaaaugccgucaaaacaguaaaaccucugaaauucgcugacggcccaaucagcacccgagccccccgcccccaugaugaaccgggcgagcuccuccuucaggugcggcaggagccccacguucucgacgcuguaauacagcgcgguguuggggggcugggcgaagcuguggguggagugaucaaagaggggcccguugacgagcucgaagaagcgaugggugaugcuggggagcagggccggguccaccuggugucgcaggagagacgcucgcaugaaccggugcgcgucgaacacgcccggcgccgagcgguugucgaugaccgugcccgcgcccgccgucagggcgcagaagcgcgcgcgcgccgcaaagccguuggcgaccgcggcgaacgucgcgggcagcaccucgccguggacgcugacccgcagcaucuucucgagcuccccgcgcugcucgcggacgcagcgccccaggcuggccaacgaccgcuucgucaggcgguccgcguacagccgccgucgcucccgcacguccgcggccgcuugcguggcgauguccccccacgucucgggccccugccccccgggcccgcggcgacggucuucguccucgcccccgcccccgggagcucccaacccccgugccccuuccucuacggcgacacgguccccgucgucgucggggcccgcgccgcccuugggcgcguccgccgcgccccccgcccccaugcgcgccagcacgcgacgcagcgccuccucgucgcacuguucggggcugacgaggcgccgcaagagcggcgucgucaggugguggucguagcacgcgcggaugagcgccucgaucugaucgucgggugacguggccugaccgccgauuauuagggcguccaccauauccagcgccgccagguggcucccgaacgcgcgaucgaaaugcuccgcccgccgcccgaacagcgccaguuccacggccaccgcggcggucuccugcugcaacucgcgccgcgccagcgcggucagguugcuggcaaacgcguccaugguggucuggccggcgcggucgccggacgcgagccagaaucgcaauucgcugauggcguacaggccgggcgugguggccugaaacacgucgugcgccuccagcagggcgucggccuccuugcggaccgagucguucucgggcgacggguggggcugcccgucgccccccgcgguccgggccagcgcaugguccaacacggagagcgcccgcgcgcggucggcguccgacagcccggcggcguggggcagguaccgccgcagcucguuggcguccagccgcaccugcgccugcugggugacgugguuacagauacgguccgccaggcggcgggcgaucgucgcccccugguucgccgucacacacaguuccucgaaacagaccgcgcaggggugggacgggucgcuaagcuccggggggacgauaaggcccgaccccaccgcccccaccauaaacucccgaacgcgcuccagcgcggcgguggcgccgcgcgagggggugaugagguggcaguaguuuagcugcuuuagaaaguucucgacgucgugcaggaaacacagcuccauauggacggucccgccauacguauccagccugacccguuggugauacggacagggucgggccaggcccauggucuccgugaaaaacgccgcgacgucucccgcggucgcgaacgucuccaggcugcccaggagccgcucgcccucgcgccacgcguacucuagcagcaacuccagggugaccgacagcggggugagaaaggccccggccugggccuccaggcccggccucagacgacgccgcagcgcccgcaccugaagcgcguucagcuucaguugggggagcuucccccguccgaugugggggucgcaccgccggagcagcucuaucugaaacacauaggucugcaccugcccgagcagggcuaacaacuuuugacgggccacggugggcucggacaccggggcggccaucucgcggcgccgaucuguaccgcggccggaguaugcgguggaccgaggcgguccguacgcuacccggcgucuggcugagccccggggucccccucuucggggcggccucccgcgggcccgccgaccggcaagccgggagucggcggcgcgugcguuucugcucuauucccagacaccgcggagaggaaucacggcccgcccagagauauagacacggaacacaaacaagcacggaugucguagcaauaauuuauuuuacacacauuccccgccccgcccuagguucccccaccccccaaccccucacagcauauccaacgucaggucucccuuuuugucggggggccccuccccaaacgggucauccccguggaacgcccguuugcggccggcaaaugccggucccggggcccccgggccgccgaacggcgucgcguugucguccucgcagccaaaauccccaaaguuaaacaccuccccggcguugccgaguuggcugacuagggccucggccucgugcgccaccuccagggccgcguccgucgaccacucgccguugccgcgcuccagggcacgcgcggucagcuccaucaucuccucgcuuagguacucguccuccaggagcgccagccaguccucgaucugcagcugcugggugcggggccccaggcuuuucacggucgccacgaacacgcuacuggcgacggccgccccgcccucggagauaaugccccggagcugcucgcacagcgagcuuucgugcgcuccgccgccgaggcuugaggccgcgcacacaaacccggcccggggacaggccaggacgaacuugcgggugcggucaaaaauaaggagcgggcacgcguuuuugccgcccaucaggcuggcccaguucccggccugaaacacacggucguugccggccaugccguaguacuugcugaugcucaaccccaacacgaccauggggcgcgccgccaugacgggccgcagcagguugcagcuggcgaacauggacguccacgcgcccggaugcgcguccacggcguccaucagcgcgcgggccccggccuccaggcccgccccgcccugcgcggaccacgcggccgcagccugcacgcuggggggacggcgggaccccgcgaugauggccguaaggguguugaugaaguaugucgagugaucgcaguaccgcagaaucugguuugccauguaguacaucgccagcucgcucacguuguugggggccagguuaauaaaguuuaucgcgccguaguccagggaaaacuuuuuaaugaacgcgauggucucgauguccucgcgcgacaggagccgggcgggaagcugguugcguuggagggccguccagaaccacugcggguucggcugguuggaccccgggggcuugccguuggggaagauggccgcguggaacugcuucagcagaaagcccagcgguccgaggaggauguccacgcgcuugucgggcuucugguaggcgcucuggaggcuggcgacccgcgccuuggcggccucggacgcguuggcgcucgcgcccgcgaacaacacgcggcucuugacgcgcagcuccuugggaaaccccagggucacgcgggcaacgucgcccucgaagcugcucucggcgggggccgucuggccggccguuaggcugggggcgcagauagccgcccccuccgagagcgcgaccgucagcguuuuggccgacagaaacccguuguuaaacauguccaucacgcgccgccgcagcaccgguuggaauugauugcgaaaguugcgccccucgaccgacugcccggcgaacaccccguggcacugacucagggccagguccugguacacggcgagguuggaucgccgcccgagaagcugaagcagggggcacggcccgcacgcguacggguccagcgucagggacauggcgugguuggccucgcccagaccgucgcgaaacuugaaguuccuccccuccaccagguugcgcaucagcugcuccaccucgcgguccacgaccugccugacguuguucaccaccguaugcagggccucgcgguuggugaugauggucuccagccgccccauggccguggggaccgccugguccacguacugcagggucucgaguucggccaugacgcgcucggucgccgcgcgguacgucuccugcaugaugguccgggcggucucggauccguccgcgcgcuucagggccgagaaggcggcguaguuucccagcacgucgcagucgcuguacaugcuguucauggucccgaagacgccgauggcuccgcgggcggcgcuggcgaacuuuggauggcgcgcccggaggcgcaugagcgucguguguacgcaggcguggcgcgugucgaaggugcauagguuacagggcacgucggucugguuggaguccgcgacguaucgaaacacguccaucuccuggcgcccgacgaucacggcgccgucgcagcgcuccagguaaaacagcaucuuggccagcagcgccggggaaaacccacacagcauggccaggugcucgccggcaaauuccuggguuccgccgacgaggggcgcggugggccgacccucgaacccgggcaccacgugucccucgcgguccaccuguggguuggccgccacgugggucccgggcacgaggaagaagcgguaaaaggaggguuugcugugguccuuuggguccgccgggccggcgucguccaccucggugagauggagggccgaguuggugcuaaauaccauggcccccacgagucccgcggcgcgcgccagguacgccccgacggcguuggcgcgggccgcggccguguccuggcccucgaacagcggccacgcggagaugucggugggcggcucgucaaagacggccaucgacacgauagacucgagggccagggcggcgucuccggccaugacggaggccaggcgcuguucgaacccgcccgccgcgcccuugccgccgccgucgcgcccgccccgcggggucuuacccuggcuggcuucgaaggccgugaacguaaugucggcggggagggcggcgcccucgugguuuucgucaaacgccaggugggcggccgcgcgggccacggcguccacguuucggcaucgcagugccacggcggcgggucccacgaccgccucgaacaggaggcgguugagggggcgguuaaaaaacggaagcggguagguaaauuucuccccgaucgaucggugguuggcguugaacggcucugcgaugacacggcuaaaauccggcaugaacagcugcaacggguacacggguaugcggugcaccuccgccccgccuaugguuaccuuguccgagccucccaggugcagaaagguguuguugaugcacacggccuccuugaagcccucgguaacgaccagauacaggagggcgcgguccggguccaggccgaggcgcucacacagcgccucccccgucgucucguguuugaggucgccgggccgggggguguaguccgaaaagccaaaauggcggcgugcccgcucgcaaagucgcgucagguucggggccugggugcugggguccaggugccggccgccgugaaagacguacacggacgagcuguagugcgagggcgucaguuucagggacaccgcgguacccccgagccccgucgugcgagaacccacgaccacggccacguuggccucaaagccgcucuccacggucaggcccacgaccaggggcgccacggcgacgucggaaucgccgcugcgugccgacaguaacgccagaagcucgaugccuucggacggacacgcgcgagcguacacguaucccaggggcccgggggggaccuugauggugguugccgucuugggcuuugucuccauguccuuuugucaaucgguccgcgaacggagguaaucccggcacgacgacggacgcccgacaagguaugucucccgagcgucaaaauccgggggggggcggcgacggucaaggggaggguuggagaccgggguuggggaaugaaucccuccccuucaccgacaaccccccggguaaccacggggucgccgaugaaccccggcggccggcaacgcggggucccugcgagaggcacagaugcuuacggucaggugcuccgggucgggugcgucugguaugcgguugguauauguacacuuuaccugggggcgugccgguccgccccagccccucccacgccccgcgcgucaucagccggugggcguggccgcuauuauaaaaaaagugagaacgcgaagcguucgcacuuuguccuaauaauauauauauuauuaggacaaagugcgaacgcuucgcguucucacuuuuuuuauaauagcggccacgcccaccggcuacgucacucuccugucggccgccggcgguccauaagcccggccggccgggccgacgcgaauaaaccgggccgccggccggggcgccgcgcagcagcucgccgcccggauccgccagacaaacaaggcccuugcacaugccggcccgggcgagccuggggguccgguaauuuugccaucccacccaagcggcuuuuuggguuuuucucuuccccccuccccacauuccccucuuuagggguucgggugggaacaaccgcgauguuuuccgguggcggcggcccgcugucccccggaggaaagucggcggccagggcggcguccggguuuuuugcgcccgccggcccucgcggagccagccggggacccccgccuuguuugaggcaaaacuuuuacaaccccuaccucgccccagucgggacgcaacagaagccgaccgggccaacccagcgccauacguacuauagcgaaugcgaugaauuucgauucaucgccccgcgggugcuggacgaggaugcccccccggagaagcgcgccggggugcacgacggucaccucaagcgcgcccccaagguguacugcgggggggacgagcgcgacguccuccgcgucgggucgggcggcuucuggccgcggcgcucgcgccuguggggcggcguggaccacgccccggcgggguucaaccccaccgucaccgucuuucacguguacgacauccuggagaacguggagcacgcguacggcaugcgcgcggcccaguuccacgcgcgguuuauggacgccaucacaccgacggggaccgucaucacgcuccugggccugacuccggaaggccaccggguggccguucacguuuacggcacgcggcaguacuuuuacaugaacaaggaggaggucgacaggcaccuacaaugccgcgccccacgagaucucugcgagcgcauggccgcggcccugcgcgaguccccgggcgcgucguuccgcggcaucuccgcggaccacuucgaggcggaggugguggagcgcaccgacguguacuacuacgagacgcgccccgcucuguuuuaccgcgucuacguccgaagcgggcgugugcugucguaccugugcgacaacuucugcccggccaucaagaaguacgaggguggggucgacgccaccacccgguucauccuggacaaccccggguucgucaccuucggcugguaccgucucaaaccgggccggaacaacacgcuagcccagccggcggccccgauggccuucgggacauccagcgacgucgaguuuaacuguacggcggacaaccuggccaucgaggggggcaugagcgaccuaccggcauacaagcucaugugcuucgauaucgaaugcaaggcggggggggaggacgagcuggccuuuccgguggccgggcacccggaggaccuggucauccagauauccugucugcucuacgaccuguccaccaccgcccuggagcacguccuccuguuuucgcucgguuccugcgaccuccccgaaucccaccugaacgagcuggcggccaggggccugcccacgcccgugguucuggaauucgacagcgaauucgagaugcuguuggccuucaugacccuugugaaacaguacggccccgaguucgugaccggguacaacaucaucaacuucgacuggcccuucuugcuggccaagcugacggacauuuacaaggucccccuggacggguacggccgcaugaacggccggggcguguuucgcgugugggacauaggccagagccacuuccagaagcgcagcaagauaaaggugaacggcauggugaacaucgacauguacgggauuauaaccgacaagaucaagcucucgagcuacaagcucaacgccguggccgaagccguccugaaggacaagaagaaggaccugagcuaucgcgacauccccgccuacuacgccgccgggcccgcgcaacgcggggugaucggcgaguacugcauacaggauucccugcuggugggccagcuguuuuuuaaguuuuugccccaucuggagcucucggccgucgcgcgcuuggcggguauuaacaucacccgcaccaucuacgacggccagcagauccgcgucuuuacgugccugcugcgccuggccgaccagaagggcuuuauucugccggacacccaggggcgauuuaggggcgccgggggggaggcgcccaagcguccggccgcagcccgggaggacgaggagcggccagaggaggagggggaggacgaggacgaacgcgaggagggcgggggcgagcgggagccggagggcgcgcgggagaccgccggcaggcacgugggguaccagggggccaggguccuugaccccacuuccggguuucacgugaaccccguggugguguucgacuuugccagccuguaccccagcaucauccaggcccacaaccugugcuucagcacgcucucccugagggccgacgcaguggcgcaccuggaggcgggcaaggacuaccuggagaucgaggugggggggcgacggcuguucuucgucaaggcucacgugcgagagagccuccucagcauccuccugcgggacuggcucgccaugcgaaagcagauccgcucgcggauuccccagagcagccccgaggaggccgugcuccuggacaagcagcaggccgccaucaaggucguguguaacucgguguacggguucacgggagugcagcacggacuccugccgugccugcacguugccgcgacggugacgaccaucggccgcgagaugcugcucgcgacccgcgaguacguccacgcgcgcugggcggccuucgaacagcuccuggccgauuucccggaggcggccgacaugcgcgcccccgggcccuauuccaugcgcaucaucuacggggacacggacuccaucuuugugcugugccgcggccucacggccgccgggcugacggccgugggcgacaagauggcgagccacaucucgcgcgcgcuguuucugccccccaucaaacucgagugcgaaaagacguucaccaagcugcugcugaucgccaagaaaaaguacaucggcgucaucuacggggguaagaugcucaucaagggcguggaucuggugcgcaaaaacaacugcgcguuuaucaaccgcaccuccagggcccuggucgaccugcuguuuuacgacgauaccgucuccggagcggccgccgcguuagccgagcgccccgcggaggaguggcuggcgcgaccccugcccgagggacugcaggcguucggggccguccucguagacgcccaucggcgcaucaccgacccggagagggacauccaggacuuuguccucaccgccgaacugagcagacacccgcgcgcguacaccaacaagcgccuggcccaccugacgguguauuacaagcucauggcccgccgcgcgcaggucccguccaucaaggaccggaucccguacgugaucguggcccagacccgcgagguagaggagacggucgcgcggcuggccgcccuccgcgagcuagacgccgccgccccaggggacgagcccgccccccccgcggcccugcccuccccggccaagcgcccccgggagacgccgucgccugccgaccccccgggaggcgcguccaagccccgcaagcugcugguguccgagcuggccgaggaucccgcauacgccauugcccacggcgucgcccugaacacggacuauuacuucucccaccuguugggggcggcgugcgugacauucaaggcccuguuugggaauaacgccaagaucaccgagagucuguuaaaaagguuuauucccgaaguguggcaccccccggacgacguggccgcgcggcuccggaccgcaggguucggggcggugggugccggcgcuacggcggaggaaacucgucgaauguugcauagagccuuugauacucuagcaugagccccccgucgaagcugaugucccucauuuuacaauaaaugucugcggccgacacggucggaaucuccgcguccguggguuucucugcguugcgccggaccacgagcacaaacgugcucugccacacgugggcgacgaaccgguaccccgggcacgcggugagcauccggucuaugagccgguagugcaggugggcggacgugccgggaaagaugacguacagcauguggcccccguaagugggguccggguaaaacaacagccgcgggucgcacgccccgccuccgcgcaggaucguguggacgaaaaaaagcucggguuggccaagaaucccggccaagagguccuggaggggggcguuguggcggucggccaacacgaccaaggaggccaggaaggcgcgaugcucgaauaucguguugaucugcugcacgaaggccaggauuagggccucgcggcugguggcggcgaaccgcccgucucccgcguugcacgcgggacagcaacccccgaugccuagguaguagcccaucccggagagggucaggcaguugucggccacggucugguccagacagaagggcagcgagacgggaguggucuucaccaggggcaccgagagcgagcgcacgauggcgaucuccucggagggcgucugggcgagggcggcgaaaaggccccgauagcgcuggcgcucguguaaacacagcuccuguuugcgggcgugaggcggcaggcucuuccgggaggcccgacgcaccacgcccagagucccgccggccgcagaggagcgcgaccgccggcgcuccuugccgugauagggcccgggccgggagccgcggcgaugggggucggugucauacauagguacacagggugugcuccagggacaggagcgagaucgaguggcgucuaagcagcgcgcccgccucacggacaaauguggcgagcgcggugggcuuugguacaaauaccugauacgucuugaagguguagaugagggcacgcaacgcuaugcagacacgccccucgaacucguucccgcaggccagcuuggccuuguggagcagcagcucgucgggauggguggcggggggauggccgaacagaacccaggggucaaccuccaucuccguaauggcgcacauggggucacagaacaugugcuuaaagauggccucgggccccgcggcccgaagcaggcucacaaaccggcccccguccccgggcugcgucucggggucagccucgagcuggucgacgacggguacgauacagucgaagaggcucguguuguuuuccgaguagcggaccacggaggcccggagucugcgcagggccagccaguaagcacgcaccaguaacagguuacacagcaggcauucuccgccggugcgcccgcgcccccggccguguuucagcacgguggccaucagagggcccaggucgaggucgggcugggcaucggguucgguaaacugcgcaaagcgcggagccacgucgcgcgugcgugccccgcgaugcgcuucccaggacuggcggaccguggcgcgacgggccuccgcggcagcgcgcagcuggggccccgacucccagacggcgggggugccggcgaggagcaacaggaccagauccgcguacgcccacguauccggcgacuccuccggcucgcgguccccggcgaccgucucgaauuccccguugcgagcggcggcgcgaguacagcagcuguccccgcccccgcgccgacccuccgugcaguccaggagacgggcgcaauccuuccaguucaucagcgcgguggugagcgacggcugcgugccggaucccgccgccgaccccgcccccuccucgcccccggaggccaagguuccgaugagggcccggguggcagacugcgccaggaacgaguaguuggaguacugcaccuuggcggcucccggggagggcgagggcuuggguugcuucugggcaugccgcccgggcaccccgccgucgguacggaagcagcaguggagaaaaaagugccgguggaugucguuuauggugagggcaaagcgugcgaaggagccgaccagggucgccuucuuggugcgcagaaaguggcgguccaugacguacacaaacucgaacgcggccacgaagaugcuagcggcgcaguggggcgcccccaggcauuuggcacagagaaacgcguaaucggccacccacugaggcgagaggcgguagguuugcuuguacagcucgauggugcggcagaccagacagggccgguccagcgcgaaggugucgauggccgccgcggaaaagggcccgguguccaaaagccccuccccacagggauccgggggcggguugcgggguccuccgcgcccgcccgaacccccuccgucgcccgcccccccgcgggcccuugagggggcggugaccacgucggcggcgacguccucgucgagcguaccgacgggcggcacaccuaucacgugacuggccgucaggagcucggcgcagagagccucguuaagagccaggaggcugggaucgaaggccacauacgcgcgcucgaacgcccccgccuuccagcugcugccgggggacucuucgcacaccgcgacgcucgccaggaccccggggggcgaaguugccauggcugggcgggaggggcgcacgcgccagcgaacuuuacgggacacaauccccgacugcgcgcugcggucccagacccuggagagucuagacgcgcgcuacgucucgcgagacggcgcgcaugacgcggccgucugguucgaggauaugacccccgccgagcuggagguugucuucccgacuacggacgccaagcugaacuaccugucgcggacgcagcggcuggccucccuccugacguacgccgggccuauaaaagcgcccgacgacgccgccgccccgcagaccccggacaccgcgugugugcacggcgagcugcucgccgccaagcgggaaagauucgcggcggucauuaaccgguuccuggaccugcaccagauucugcggggcugacgcgcgugcuguugggcgggacgguucgcgaacccuuugguggguuuacgcgggcacgcacgcucccaucgcgggcgccauggcgggacugggcaagcccuacaccggccacccaggugacgccuucgagggucucguucagcgaauucggcuuaucgucccaucuacguugcggggcggggacggggaggcgggccccuacucucccuccagccuccccuccaggugcgccuuucaguuucauggccaugacggguccgacgagucguuucccaucgaguauguacugcggcuuaugaacgacugggccgaggucccgugcaacccuuaccugcgcauacagaacaccggcgugucggugcuguuucagggguuuuuucaucgcccacacaacgcccccgggggcgcgauuacgccagagcggaccaaugugauccugggcuccaccgagacgacggggcugucccucggcgaccuggacaccaucaaggggcggcucggccuggaugcccggccgaugauggccagcauguggaucagcugcuuugugcgcaugccccgcgugcagcucgcguuucgguucaugggccccgaagaugccggacggacgagacggauccugugccgcgccgccgagcaggcuauuacccgucgccgccgaacccggcggucccgggaggcguacggggccgaggccgggcuggggguggccggaacggguuuccgggccaggggggacgguuuuggcccgcuccccuuguuaacccaagggcccucccgcccguggcaccaggcccugcggggucuuaagcaccuacggauuggcccccccgcgcucguuuuggcggcgggacucguccugggggccgcuauuuggugggugguuggugcuggcgcgcgccuauaaaaaaggacgcaccgccgcccuaaucgccagugcguuccggacgccuucgccccacacagcccucccgaccgacacccccauaucgcuucccgaccuccggucccgauggccgucccgcaauuucaccgccccagcaccguuaccaccgauagcguccgggcgcuuggcaugcgcgggcucgucuuggccaccaauaacucucaguuuaucauggauaacaaccacccgcacccccagggcacccaaggggccgugcgggaguuucuccgcggucaggcggcggcgcugacggaccuuggucuggcccacgcaaacaacacguuuaccccgcagccuauguucgcgggcgacgccccggccgccugguugcggcccgcguuuggccugcggcgcaccuauucaccguuugucguucgagaaccuucgacgcccgggaccccgugaggcccggggaguuccuucugggguguuuuaaucaauaaaagaccacaccaacgcacgagccuugcguuuaaugucguguuuauucaagggagugggauaggguucgacgguucgaaacuuaacacaccaaauaaucgagcgcgucuagcccaguaacaugcgcacgugauguaggcuggucagcacggcgucgcugugaugaagcagcgcccggcggguccgcuguaacugcuguuguaggcgguaacaggcgcggaucaguaccgccagggcgcuacgaccggugcguugcacguagcgucgcgacagaacugcguuugccgauacgggcggggggccgaauuguaagcgcgucaccucuugggagucaucggcggauaacgcacugaaugguucguugguuaugggggagugugguuccccagggagugggucgagcgccucggccucggaauccgagaggaacaacgagguggcgucggagucuucgucgucagagacauacagggucugaagcagcgacacgggcggggggguagcgucgauguguagcgcgagggaggaugcccacgaagacaccccagacaaggagcugcccgugcguggauuuguggaagacgcggaagccgggacggaugggcgguuuugcggugcccggaaccgaaccgccggauacuccccgggugcuacaugcccguuuuggggcugggguuggggcugggguuggggcugggguuggggcugggguuggggcugggguuggggcugggguugggguugggguuggggcugggguugggguuggggcuggggcuggggcuggggcuggggcuggggcuggggcuggggcuggggcuggggcuggggcuggggcuggggcuggggcuggggcuggggcugggguuggggcgcggacaggcggcugacggucaaaugcccccgggggcgcgcagauguggugggcguggccaccggcugccguguaguggggcggcgggaaaccgggccuccgggcgcaacaccgcccuccagcgucaaguauguggggggcgggccugacgucgggggcggggcgacggguuggaccgcgggaggcgggggagagggaccugcgggagaggaugaggucggcucggccggguugcggccuaaaacaggggccguggggucggcggggucccagggugaagggagggauucccgcgauucggacagcgacgcgacagcggggcgcguaaggcgccgcugcggcccgccuacgggaacccugggggggguuggcgcgggacccgagguuagcggggggcggcgguuuucgcccccgggcaaaaccgugccgguugcgaccgggggcggaacgggaucgauagggagagcgggagaagccuggccggcggccuggggcccgagcgggaggggcacaccagacaccaaagcguggggcgcuggcucuggggguuugggaggggccggggggcgcgcgaaaucgguaaccggggcgaccgugucggggagggcaggcggccgccaacccuggguggucgcggaagccuggguggcgcgcgccagggagcgugcccggcggugucggcgcgcgcgcgacccggacgaagaagcggcagaagcgcgggaggaggcgggggggcggggggcgguggcaucggggggcgccggggaacuuuggggggacggcaagcgccggaagucgucgcgggggcccacgggcgccggccgcgugcuuucggccgggacgcccggucgugcuucgcgagccgugacugccggcccagggggccgcggugcacacugggacguggggacggacugaucggcggugggcgaaaggggguccggggcaaggaggggcgcggggccgccggagucgucagacgcgagcuccuccaggccgugaauccaugcccacaugcgaggggggacgggcucgccggggguggcgucggugaauagcgugggggccaggcuuccgggccccaacgagcccuccgccccaacaagguccacagggccgggggucggguuugggaccgaggggcucuggucgucgggggcgcgcugguacaccggaugccccgggaauagcucccccgacaggagggaggcgucgaacggccgcccgaggauagcucgcgcgaggaagggguccucgucgguggcgcuggcggcgaggacguccucgccgcccgccacaaacgggagcuccucgguggccucgcugccaacaaaccgcacgucgggggggccggggggguccggguuuucccacaacaccgcgaccggggucauggagauguccacgagcaccagacacggcgggccccgggcgaggggccgcucggcgaugagcgcggacaggcgcgggagcugugccgccagacacgcguuuucgaucggguucaggucggcgugcaggaggcggacggcccacgucucgaugucggacgacacggcaucgcgcaaggcggcguccggcccgcgagcgcgugagucaaacagcgugagacacagcuccagcuccgacucgcgggaaaaggccgugguguugcggagcgccacgacgacgggcgcgcccaggagcacugccgccagcaccagguccauggccguaacgcgcgccgcgggggugcgguggguggcggcggccggcacggcgacgugcuggcccgugggccgguagagggcguuggggggagcggggggugacgccucgcgcccccccgaggggcucagcgucugcccagauuccagacgcgcggucagaagggcgucgaaacugucauacucuguguagucguccggaaacaugcagguccaaagagcgaccagagcggugcuugggagacacaugcgcccgaggacgcucaccgccgccagcgccugggcgggacucagcuuucccagcgcggcgccgcgcucgguucccagcucggggaccgagcgccagggcgccagggggucgguuucggacaacuugccgcggcgccagucugccagccgcgugccgaacaugaggccccgggucggagggccuccggccgaaaacgcuggcagcacgcggaugcgggcgucuggaugcggggucaggcgcugcacgaauagcauggaaucugcugcguucugaaacgcacgggggagggugagaugcauguacucguguuggcgaaccagauccaggcgccaaaagguguaaauguguuccggggagcuggccaccagcgccaccagcacgucguucucguuaaaggaaacgcggugccuaguggagcucugggguccgagcggcggccccggggccgccgcgucacccccccauuccagcugggcccagcgacacccaaacucgcgcgugagaguggucgcgacgagggcgacguagagcucggccgccgcauccaucgaggccccccaucucgccuggcgguggcgcacaaagcguccgaagagcugaaaguuggcggccugggcgucgcugagggccagcugaagccgguugaugacggugaggacguacauggccgugacggucgaggccgacuccaggguguccgucggaagcggggggcgaaugcaugccgccucgggacacaucagcagcgcgccgagcuugucggucacggccgggaagcagagcgcguacugcaguggcguuccauccgggaccaaaaagcugggggcgaacggccgauccagcguacugguggccucgcgcagcaccaggggccccgggccuccgcucacucgcagguacgccucgccccggcggcgcagcaucugcgggucggccucuuggccggguggggcggacgcccgggcgcgggcgucuagggcgcgaagauccacgagcaggggcgcgggcgcggccgccgcgcccgcgcccgucuggccuguggccuuggcguacgcgcuauauaagcccaugcggcguuggaugagcucccgcgcgccccggaacuccuccaccgcccauggggccagguccccggccaccgcgucgaauuccgccaacaggccccccagggugucaaaguucaucucccaggccacccuuggcaccaccucgucccgcagccgggcgcucaggucggcguguugggccacgcgccccccgagcuccuccacggccccggcccgcucggcgcucuuggcgcccaggacgcccugguacuuggcgggaaggcgcucguagucccgcugggcucgcagccccgacacaguguuggugguguccugcagggcgcgaagcugcucgcaugccgcgcgaaaucccucgggcgauuuccaggcccccccgcgaacgcggccgaagcgaccccauaccucgucccacuccgccucggccuccucgagagaccuccgcagggccucgacgcggcgacgggugucgaagagcgccugcaggcgcgcgcccugucgcgucaggaggcccgggccgucgccgcuggccgcgcuuagcgggugcgucucaaagguacgcugggcauguuccaaccaggcgaccgccugcacgucgagcucgcgcgccuucuccgucugguccaccagaauuucgaccugauccgcgaucuccuccgccgagcgcgccugguccagcgucuuggccacggucgccgggacggcgaccaccuucagcagggucuucagauuggccagacccucggccucgagcugggcccggcgcucgcgcgcggccagcaccucccgcagccccgccgugacccgcucgguggcuucggcgcgcugcuguuuggcgcgcaccacggcguccuugguaucggccagguccugucgggucacgaaugcgacguagugcgcguacgccguguccuucacggggcucugguccacgcgcuccagcgccgccacgcacgccaccagcgcguccucgcucgggcagggcagggugaccccugcccggacaagcucggcggccgccgccgggucguugcgcaccgcggauaucuccuccgcggcggcggccagguccagcgccacgcuuccgaucgcgcgccgcgcgucggcccggagggcguccaggcgaucgcggauauccacguacucggcguagcccuuuugaaaaaacggcacguacuggcgcagggccggcacgccccccaagucuuccgacagguguaggacggccucgugguagucgauaaacccgucguucgccugggcccgcuccagcagcccccccgccagccgcagaagccgcgccaggggcucgguguccacccgaaacaugucggcguacgugucggccgcggccccgaaggccgcgcuccagucgaugcggugaauggcugcgagcggggggagcaugggguggcgcugguucucggggguguauggguuaaacgcaagggccgucuccagggcaagggucaccgccuuggcguugguucccagcgccuguucggcccgcuuucggaagucccggggguuguagccgugcgugcccgccagcgccugcaggcgacggagcucgaccacgucaaacucggcaccgcuuuccacgcgguccagcacggccuccacgucggcggcccagcgcucguggcuacugcgggcgcgcugggccgccaucuucucucugaggucggcgguggcggccucaaguucgucggcgcggcgucgcguggcgccgaugaccuuucccagcuccugcagggcgcgcccgcugggggagugguccccggccgucccuucggcgugcaacaggcccccgaaccugcccucguggcccgcgaggcuuucccgcgcgccgguggucgcgcgcgucgcggccuggaucagggaggcaugcucucccuccgguugguuggcggcccggcgcaccuggacgacaaggucggcggcagccgacccuaaggucgugagcugggcgauggccacccgcgcguccagggccaaccgagucgccuugacguaucccgcggcgcugucggccauggccgcuaggaaggccaggggggaggccgggucgcuggcggccgcgcccagggccgucaccgcgucgaccaggacgcggugcgcccgcacggccgcauccaccgucgacgcagggucugccguugcgacggcggcgcugccggcguugauggcguucgagacggcgugggcuaugaucggggcgugaucggcgaagaacugcaagagaaacggagucucuggggcgucggcgaacagguucuucagcaccaccacgaagcugggaugcaagccagacagagccgucgccguguccggagucgggugcuccagggcaucucgguacugccccagcagcccccacauguccgcccgcagcgccgccguaaccucagggggcgccccccgaacggccucggggagguccgaccagcccgccggcagggaggcccgcagggucgccaggacggccggacaggccuuuagccccacaaagucagggagggggcgcaggacccccuggaguuugugcaagaacuucucccgggcgucgcgggccaccuucgcccgcucccgcgcucccucgagcauugccuccagggagcgcgcgcgcucccgcaaacgggcacgcgcaucgggggcgagcucugccgucagcuuggcggcauccauggcccgcgccugccgcagcgcuuccucggccaugcgcguggccucuggcgacagcccgccgucgucgggguagggcgacgcgccgggcgcaggaacaaaggccgcgucgcuguccagcugcuggcccagggccgcaucuagggcgucgaagcgccgcagcucggccagacccgagcugcggcgcgccuguuggucguuaaugucgcggaugcugcgcgccagcucguccaguggcuugcguucuaucagcccuugguuggcggcguccgucaggacggagagccaggccgccagguccucgggggcguccagcgucuggccccgcuggaucagaucccgcaacaggauggccguggggcuggucgcgaucgggggcggggcgggaauggcggcgcgcugcgcgaugucccgcgugugcuggucgaagacaggcagggacucgagcagcuggaccacgggcacgacggcggccgaagccacgugaaaccggcggucguuguugucgcuggccuguagagccuuggcgcuguauacggccccccgguaaaaguacuccuuaaccgcgcccucgaucgcccgacgggccuggguccgcaccuccuccagccgaaccugaacggccucggggcccagggggggugggcgcggagcccccugcggggccgccccggccggggcgggcauuacgccgaggggcccggcgugcugugagaccgcgucgaccccgcgagcgagggcgucgagggccucgcgcaucuggcgauccuccgccuccacccuaaucucuucgccacgggcaaauuuggccagagccuggacucuauacagaagcgguucugggugcgucgggguggcgggggcaaaaaggguguccgggugggccugcgagcgcuccagaagccacucgccgaggcguguauacagauuggccggcggggccgcgcgaagcugcagcuccagguccgcgaguuccccguaaaaggcguccgucucccgaaugacaucccuagccacaaggaucagcuucgccagcgccaggcgaccgaucagagaguuuucguccagcacgugcuggacgaggggcagaugggcggccacgucggccaggcucaggcgcguggaggccagaaagucccccacggccguuuuccagggcagcauguucaggguaaacuccagcagggcggcggccgggccggccaccccggccugggugugcguccgggccccguucucgaugagaaaggcgaggacgcguucaaagaaaaaaauaacacagagcuccagcagccccggagaggccggauacggcgaccguaaggcgcugauggugagccgcgaacacgcggcgaccucgcgggccagggcggcggagcacgcggugaacuuaaccgccguggcggccacguuugggugggccucgaacagcugggcgaggucugcgcccgggggcucgggcgagcggcgagucuucagcgccucgagggccugugaggacgccggaaccgugggcccgucguccucgcccgccucggcgaccggcggcccggccgggucggggggugccgaggcgaggacaggcuccggaacggaggcggggaccgcggccccgacggggguuuugccuuuggggguggauuucuucuugguuuuggcagggggggccgagcguuucguuuucucccccgaagucaggucuucgacgcuggaaggcggaguccaggugggucggcggcgcuugggaaggccggccgaguagcgugcccggugccgaccaaccgggacgacgcccaucuccaggacccgcaugucgucgucaucuucuucggccgccucugcggcgggggucuugggggcggagggaggcgguggugggaucgcggagggugggucggcggagggugggucggcggaggggggauccgugggugggguacccuucagggccaccgcccauacaucgucgggcgcccgauucgggcgcuuggccucugguuuugccgacggaccggccgucccccgggaugucucggaggcccugucgucgcgacgggcccgggucgguggcggcgacugggcggcugugggcggguguggccccgggcccccuacccccucccgggggcccacgccgacgcagggcucccccaggcccgcgaucucgccccgcagggggugcgugauggccacgcgccguucgcugaacgcuucguccugcagguaagucucgcuggccccguaaagaugcagagccgcggccgucaaguccgcaggagccgcggguuccgggcccgacggcacgaaaaacaccauggcucccgcccaccguacguccgggcgaucgcggguguaauacgucagguauggauacaugucccccgcccgcacuuuggcgaugaacgcgggggugcccuccggaaggccgugcgggucaaaaagguaugcggugucgccgucccugaacagccccaucccuagggggccaaugguuaggagcguguacgacagggggcgcagggcccacgggccggcgaagaacgugugugcggggcauugugucuccagcaggcccgccgcgggcuccccgaagaagcccaccucgccguauacgcgcgagaagacacagcgcaguccgccgcgcgccccuggguacucgaggaaguuggggagcucgacgaucgaacacaugcgcggcggcccagggcccgcggucgcgcgcguccacucgccccccucgaccaaacaucccucgauggccuccgcggacaggacgucgcgagggcccacaucaaauaugaggcugagaaaggacagcgacgagcgcaugcacgauaccgacccccccggcuccaggucgggcgcgaacugguuccgagcaccggugaccacgaugucgcgaucccccccgcguuccaucguggagugcgguggggugcccgcgaucauaugugcccugcuggccagagacccggccuguuuauggaccggacccccgggguuaguguuguuuccgccacccaugcccccguaccauggccccgguuccccugauuaggcuacgagucgcggugaucgcuucccaaaaaccgagcugcguuugucugucuuggucuuccacccccccccccgcccgcccgcacaccauaacaccgagaacaacacacgggggugggcguaacauaauaaagcuuuauugguaacuaguuaacggcaaguccguggguggcgcgacgguguccuccgggaucaucucgucguccucgacggggguguuggaaugaggcgcccccucgcgguccgccuggcgugggccgugcccauaggccuccggcuucugugcguccaugggcauaggcgcggggagacuguuuccggcgucgcggaccuccaggucccugggagacuccgguccggcuaacggacgaaacgcggaagcgcgaaacacgccgucggugacccgcaggagcucguucaucaguaaccaauccauacucagcguaacggccagccccuggcgagacagauccacggaguccggaaccgcggucgucuggcccagggggccgaggcuguaguccccccaggccccuaggucgcgacggcucguaagcacgacgcggucggccgcggggcuuugcgggggggcguccucgggcgcaugcgccauuaccucucggauggccgcggcgcgcuggucggccgagcugaccaagggcgccacgaccacggcgcgcuccgucugcaggcccuuccacgugucguggaguuccuggacaaacucggccacgggcucgggucccgcggccgcgcgcgcggcuugauagcaggccgacagacgccgccagcgcgcuagaaacugacccaugaagcaaaacccggggaccuggucucccgacagcagcuucgacgcccgggcgugaaugccggacacgacggacagaaacccgugaauuucgcgccggaccacggccagcacguuguccucgugcgacaccugggccgccagcucgucgcacacccccaggugcgccgugguuucggugaugacggaacgcaggcucgcgagggacgcgaccagcgcgcgcuuggcgucgugauacaugcugcaguacugacucaccgcgucccccauggccucggggggccagggccccaggcggucgggcguguccccgaccaccgcauacaggcggcgcccgucgcucucgaaccgacacucgaaaaaggcggagagcgugcgcaugugcagccgcagcagcacgauggcguccuccaguuggcgaaucagggggucugcgcgcucggcgagguccugcagcaccccccgggcggccagggcguacaugcuaaucaacaggaggcuggugcccaccucggggggcggggggggcugcagcuggaccaggggccgcagcugcucgacggcaccccuggagaucacguacagcucccggagcagcugcucuauguugucggccaucugcauaguggggccgaggccgccccgggcggccgguucgaggagggugaucagcgcgcccaguuuggugcgauggcccucaaccguggggagauagcccagcccaaagucccgggcccaggccaacacacgcagggcgaacucgaccgggcggggaagguaggccgcgcuacacguggcccucagcgcguccccgaccaccagggccagaacguaggggacgaagcccgggucggcgaggacguuggggugaaugcccucgagggcggggaagcggaucugggucgccgcggccagguggacagagggggcguggcugggcugcccgacggggagaagcgcggacagcggcguggccgggguggugggggugaugucccagugggucugaccauacacgucgauccagaugagcgccgucucgcggagaaggcuggguugaccggaacuaaagcggcgcucggccgucucaaacucccccacgagcgcccgccgcaggcucgccagauguuccgucggcacggccggacccaugauacgcgccagcgucuggcuuagaacgccccccgacaggccgaccgccucgcagagccgcccgugcgugugcucgcuggcgcccuggacccgccugaaaguuuuuacguaguuggcauaguacccguauucccgcgccaacccaaacacguucgaccccgcgagggcaaugcacccaaagagcugcuggacuucgccgaguccguggccggugggcguccgcgcggggacgcccgccgccagaaaccccuccagggccgaaagguagugcgugcagugcgagggcgugaacccagcgucgaucaggguguugaucaccacggagggcgaauugguauucuggaucaacguccacgucugcugcagcagagccagcagccgcugcugggcgccggcggagggcugcuccccgagcugcagcaggcuggagacggcaggcuggaagacugccagugccgacgaacucaggaacggcacgucgggaucaaacacggccacguccguccgcacgcgcgccauuagcguccccgggggcgcacaggccgagcgcgggcugacgcggcugagggccgucgacacgcgcaccuccucgcggcugcgaaccaucuuguuggccucgagcggcggaaucauuauggccgggucgaucucccgcacggugugcugaaacugcgccaacaggggcggcgggaccacagccccccgcucgggggucgucagguacucguccaccagggccaacguaaagagggcccgugugaggggagugagggucgcgucgucuaugcgcuggaggugcgccgagaacagcgucacccgauuacucaccagggccaagaaccggaggcccucuugcacgaacggggcggggaagagcaggcuguacgccggggugguaagguucgcgcugggcugccccaacgggaccggcgccaucuugagcgacgucuccccaagggccucgauggagguccgcgggcucauggccaagcagcucuuggugacgguuugccagcggucuauccacuccacggcgcacuggcggacgcggaccggccccagggccgccgcggugcgcaggccggcggaauccagcgcaugggacgugucggagccggugaccgcgaggaugguguccuugaugaccuccaucucccggaaggccuggucgggggccucggggagagccaccaccaagcgguguacgagcaacccggggagguucucggccaagagcgccgucuccggaagcccgugggcccgguggagcgcgcacagguguuccagcagcggccgccagcagucccgcgcgucugccggggcgauggccguucccgacaacagaaacgccgccauggcggcgcgcagcuuggccguggccagaaacgccgggucguccgccccguuugccgucucggccguggggguuggcgguuggcgaaggccggcuaggcucgccaauaggcgcugcauagguccguccgagggcggaccggcgggugaggucgugacgacgggggccucggacgggagaccgcggucugccaugacgcccggcucgcgugggugggggacagcguagaccaacgacgagaccgggcgggaaugacugucgugcgcuguagggagcggcgaauuaucgaucccccgcggcccuccaggacccccgcaggcguugcgaguaccccgcgucuucgcgggguguuauacggccacuuaagucccggcaucccguucgcggacccaggcccgggggauuguccggaugugcgggcagcccggacggcguggguugcggacuuucugcggggcggcccaaauggcccuuuaaacguguguauacggacgcgccgggccagucggccaacacaacccaccggaggcgguagccgcguuuggcuguggggugggugguuccgccuugcgugaguguccuuucgaccccccccccccucccucccccgggucuugcuaggucgcgaucuggggucgcaaugaagaccaauccgcuacccgcaaccccuuccguguggggcgggaguaccguggaacucccccccacaacacgcgauaccgcgggacagggccugcuucggcgcguccugcgccccccgaucucucgccgcgacggcccagggcuccccagggggucgggaccccggagggcggccagcacgcugugguugcuuggccuggacggcacagacgcgcccccuggggcgcugacccccaacgacgauaccgaacaggcccuggacaagauccugcggggcaccaugcgcgggggggcggcccugaucggcuccccgcgccaucaucuaacccgccaagugauccugacggaucugugccaacccaacgcggaucgugcugggacgcugcuucuggcgcugcggcaccccgccgaccugccucaccuggcccaccagcgcgccccgccaggccggcagaccgagcggcugggcgaggccuggggccagcugauggaggcgaccgcccuggggucggggcgagccgagagcgggugcacgcgcgcgggccuagugucguuuaacuuccugguggcggcgugugccgccucguacgacgcgcgcgacgccgccgaugcgguacgggcccacgucacggccaacuaccgcgggacgcgggugggggcgcgccuggaucguuuuuccgagugucugcgcgccaugguucacacgcacgucuucccccacgaggucaugcgguuuuucggggggcuggugucgugggucacccaggacgagcuagcgagcgucaccgccgugugcgccgggccccaggaggcggcgcacaccggccacccgggccggccccgcucggccgugauccucccggcaugugcguucguggaccuggacgccgagcuggggcuggggggcccgggcgcggcguuucuguaccugguauucacuuaccgccagcgccgggaccaggagcuguguuguguguacgugaucaagagccagcuccccccgcgcggguuggagccggcccuggagcggcuguuugggcgccuccggaucaccaacacgauucacggcaccgaggacaugacgcccccggccccaaaccgaaaccccgacuucccccucgcgggccuggccgccaauccccaaaccccgcguugcucggcuggccaggucacgaacccccaguucgccgacaggcuguaccgcuggcagccggaccugcgggggcgccccaccgcacgcaccuguacguacgccgccuuugcagagcucggcaugaugcccgaggauaguccccgcugccugcaccgcaccgagcgcuuuggggcggucagcguccccguugucauucuggaaggcgugguguggcgccccggcgaguggcgggcaugcgcgugagcguagcaaacgccccgcccacacaacgcuccgcccccaaccccuuccccgcugucacucguuguucguugacccgggcguccgccaaauaaagccacugaaacccgaaacgcgaguguuguaacguccuuugggcgggaggaagccacaaaaugcaaaugggauacauggaaggaacacacccccgugacucaggacaucgguguguccuuuuggguuucacugaaacuggcccgcgccccaccccugcgcgauguggauaaaaagccagcgcgggugguuuaggguaccacaggugggugcuuuggaaacuugccggucgccgugcuccugugagcuugcgucccuccccgguuuccuuugcgcucccgccuuccggaccugcucucgccuacucuucuuuggcucucggugcgauucgucaggcagcggccuugucgaaucucgaccccaccacucgccggacccgccgacguccccucucgagcccgccgaaacccgccgcgucuguugaaauggccagccgcccagccgcauccucucccgucgaagcgcgggccccgguugggggacaggaggccggcggccccagcgcagccacccagggggaggccgccggggccccucucgcccacggccaccacguguacugccagcgagucaauggcgugauggugcuuuccgacaagacgcccggguccgcguccuaccgcaucagcgauaacaacuuuguccaaugugguuccaacugcaccaugaucaucgacggagacguggugcgcgggcgcccccaggacccgggggccgcggcaucccccgcucccuucguugcggugacaaacaucggagccggcagcgacggcgggaccgccgucguggcauucgggggaaccccacgucgcucggcggggacgucuaccgguacccagacggccgacguccccaccgaggcccuugggggccccccuccuccuccccgcuucacccuggguggcggcuguuguuccugucgcgacacacggcgccgcucugcgguauucgggggggagggggauccagucggccccgcggaguucgucucggacgaccggucguccgauuccgacucggaugacucggaggacacggacucggagacgcugucacacgccuccucggacguguccggcggggccacguacgacgacgcccuugacuccgauucgucaucggaugacucccugcagauagauggccccgugugucgcccguggagcaaugacaccgcgccccuggauguuugccccgggacccccggcccgggcgccgacgccgguggucccucagcgguagacccacacgcgccgacgccagaggccggcgcuggucuugcggccgaucccgccguggcccgggacgacgcggaggggcuuucggacccccggccacgucugggaacgggcacggccuaccccgucccccuggaacucacgcccgagaacgcggaggccguggcgcgcuuucugggagaugccgugaaccgcgaacccgcgcucaugcuggaguacuuuugccggugcgcccgcgaggaaaccaagcgugucccccccaggacauucggcagccccccucgccucacggaggacgacuuugggcuucucaacuacgcgcucguggagaugcagcgccugugucuggacguuccuccggucccgccgaacgcauacaugcccuauuaucucagggaguaugugacgcggcuggucaacggguucaagccgcuggugagccgguccgcucgccuuuaccgcauccuggggguucuggugcaccugcggauccggacccgggaggccuccuuugaggaguggcugcgauccaaggaaguggcccuggauuuuggccugacggaaaggcuucgcgagcacgaagcccagcuggugauccuggcccaggcucuggaccauuacgacugucugauccacagcacaccgcacacgcuggucgagcgggggcugcaaucggcccugaaguaugaggaguuuuaccuaaagcguuuuggcgggcacuacauggaguccgucuuccagauguacacccgcaucgccggcuuuuuggccugccgggccacgcgcggcaugcgccacaucgcccuggggcgagaggggucguggugggaaauguucaaguucuuuuuccaccgccucuacgaccaccagaucguaccgucgacccccgccaugcugaaccuggggacccgcaacuacuacaccuccagcugcuaccugguaaacccccaggccaccacaaacaaggcgacccugcgggccaucaccagcaacgucagugccauccucgcccgcaacgggggcaucgggcuaugcgugcaggcguuuaacgacuccggccccgggaccgccagcgucaugcccgcccucaagguccuugacucgcugguggcggcgcacaacaaagagagcgcgcguccgaccggcgcgugcguguaccuggagccguggcacaccgacgugcgggccgugcuccggaugaaggggguccucgccggcgaagaggcccagcgcugcgacaauaucuucagcgcccucuggaugccagaccuguuuuucaagcgccugauucgccaccuggacggcgagaagaacgucacauggacccuguucgaccgggacaccagcaugucgcucgccgacuuucacggggaggaguucgagaagcucuaccagcaccucgaggucaugggguucggcgagcagauacccauccaggagcuggccuauggcauugugcgcagugcggccacgaccgggagccccuucgucauguucaaagacgcggugaaccgccacuacaucuacgacacccagggggcggccaucgccggcuccaaccucugcaccgagaucguccauccggccuccaagcgauccaguggggucugcaaccugggaagcgugaaucuggcccgaugcgucuccaggcagacguuugacuuugggcggcuccgcgacgccgugcaggcgugcgugcugauggugaacaucaugaucgacagcacgcuacaacccacgccccagugcacccgcggcaacgacaaccugcgguccaugggaaucggcaugcagggccugcacacggccugccugaagcuggggcuggaucuggagucugccgaauuucaggaccugaacaaacacaucgccgaggugaugcugcugucggcgaugaagaccagcaacgcgcugugcguucgcggggcccgucccuucaaccacuuuaagcgcagcauguaucgcgccggccgcuuucacugggagcgcuuuccggacgcccggccgcgguacgagggcgagugggagaugcuacgccagagcaugaugaaacacggccugcgcaacagccaguuugucgcgcugaugcccaccgccgccucggcgcagaucucggacgucagcgagggcuuugccccccuguucaccaaccuguucagcaaggugacccgggacggcgagacgcugcgccccaacacgcuccugcuaaaggaacuggaacgcacguuuagcgggaagcgccuccuggaggugauggacagucucgacgccaagcagugguccguggcgcaggcgcucccgugccuggagcccacccacccccuccggcgauucaagaccgcguuugacuacgaccagaaguugcugaucgaccugugugcggaccgcgcccccuacgucgaccauagccaauccaugacccuguaugucacggagaaggcggacgggacccucccagccuccacccugguccgccuucugguccacgcauauaagcgcggacuaaaaacagggauguacuacugcaagguucgcaaggcgaccaacagcggggucuuuggcggcgacgacaacauugucugcaugagcugcgcgcugugaccgacaaacccccuccgcgccaggcccgccgccacugucgucgccgucccacgcucuccccugcugccauggauuccgcggccccagcccucucccccgcucugacggcccuuacggaccagagcgcgacggcggaccuggcgauccagauuccaaagugccccgaccccgagagguacuucuacaccucccagugucccgacauuaaccaccugcgcucccucagcauccuuaaccgcuggcuggaaaccgagcuuguuuucgugggggacgaggaggacgucuccaagcuuuccgagggcgagcucagcuuuuaccgcuuccucuucgcuuuccugucggccgccgacgaccugguuacggaaaaccugggcggccucuccggccuguuugagcagaaggacauucuccacuacuacguggagcaggaaugcaucgaagucguacacucgcgcguguacaacaucauccagcuggugcuuuuccacaacaacgaccaggcgcgccgcgaguacguggccgguaccaucaaccacccggccauccgcgccaagguggacugguuggaagcgcgggugcgggaaugcgccuccguuccggaaaaguucauucucaugauccucaucgagggcaucuuuuuugccgccucguuugccgccaucgccuaccuucgcaccaacaaccuucugcgggucaccugccagucaaacgaccucaucagccgggacgaggccgugcacacgacggccucguguuacaucuacaacaacuaccucggcgggcacgccaagcccccgcccgaccgcguguacgggcuguuccgccaggcggucgagaucgagaucggauuuauccgaucccaggcgccgacggacagccauauccugagcccggcggcgcuggcggccaucgaaaacuacgugcgauucagcgcggaucgccuguugggccuuauccacaugaagccacuguuuuccgccccaccccccgacgccagcuuuccgcugagccucauguccaccgacaaacacaccaauuuuuucgagugucgcagcaccuccuacgccggggcggucgucaacgaucugugagugucgcggcgcgcuucuacccguguuugcccauaauaaaccucugaaccaaacuuugggucucauugugauucuugucagggacgcgggggugggagaggauaaaaggcggcgcaaaaagcaguaaccagguccguccagauucugcgggcauaggauaccauaauuuuauuggugggucguuuguucggggacaagcgcgcucgucugacguuugggcuacucgucccagaauuuggccaggacguccuuguagaacgcgggugggggggccuggguccgcaacugcuccagaaaccugucggcgauaucaggggccgugauaugccgggucacgauagaucgcgccagguuuucgucgcggauguccugguagauaggcaggcguuucagaagaguccacggcccccgcuccuuggggccgauaagcgauaugacguacuuaauguagcgguguuccaccagcucggugauggucaugggaucggggagccaguccagggacucuggggcgucguggaugacguggcgucgcggguuggccacauaacugcggugcucuuccagcagcugcgcguucgggaccuggacgagcucgggcggggugaguaucuccgaggaggacgaccuggggccgggguggcccccgguaacgucccggggauccagggggagguccucgucgucuucguauccgccggcgaucuguuggguuagaauuucgguccacgagacgcgcgucucggugccgccggcggccggcggcagagggggccugguuuccguggagcgcgagcugguguguucccggcggauggcccgccgggucugagagcgacucggggggguccagugacauucgcgcagcacauccuccacggaggcguagguguuauugggauggaggucgguguggcagcggacaaagagggccaggaacuggggguagcucaucuuaaaguacuuuaguauaucgcgacaguugaucgugggaauguagcaggcgcuaauauccaacacaauaucacagcccaucaacaggaggucaguguccgugguguacacguacgcgaccguguuggugugauagagguuggcgcaggcaucguccgccuccagcugacccgaguuaauguaggcguaccccagggcccggagaacgcgaauacagaacagaugcgccagacgcagggccggcuucgagggcgcggcggacggcagcgcggcuccggacccggccgucccccggguccccgaggccagagaggugccgcgccggcgcauguuggaaaaggcagagcugggucuggagucggugaugggggaaggcgguggagaggcguccacgucacuggccuccucguccguccggcacugggccgucgugcgggccaggauggccuuggcuccaaacacaaccggcuccauacaauugaccccgcgaucgguaacgaagauggggaaaagggacuuuuggguaaacaccuuuaauaagcgacagaggcaguguagcguaauggccucgcggucguaacugggguaucggcgcugauauuugaccaccaacguguacaugacguuccacagguccacggcaaugggggugaaguacccggccggggccccaaggccccggcgcuugaccagauggugugugugggcaaacuucaucaucccgaacaaacccaugucaggucaauuguaacugcggaucggccuaacuaaggcgugguuggugcgacgguccgggacacccgagccugucucucuguguauggugacccagacaacaacaccgacacaagaggacaauaauccguuaggggacgcucuuuauaauuucgauggcccaacuccacgcggauuggugcagcacccugcaugcgccggugcgggccaaccuuccccccgcucauugccucuuccaaaaggguguggccuaacgagcugggggcguauuuaaucaggcuagcgcggcgggccugccguaguuucuggcucggugagcgacgguccgguugcuuggguccccuggcugccaucaaaaccccacccucgcagcggcauacgcccccuccgcgucccgcacccgagaccccggcccggcugcccucaccaccgaagcccaccucgucacugugggguguucccagcccgcguugggaugacggauuccccuggcgguguggcccccgccucccccguggaggacgcgucggacgcgucccucgggcagccggaggagggggcgcccugccaggugguccugcagggcgccgaacuuaauggaauccuacaggcguuugccccgcugcgcacgagccuucuggacucgcuucugguuaugggcgaccggggcauccuuauccauaacacgaucuuuggggagcagguguuccugccccuggaacacucgcaauucagucgguaucgcuggcgcggacccacggcggcguuccugucucucguggaccagaagcgcucccuccugagcguguuucgcgccaaccaguacccggaccuacgucggguggaguuggcgaucacgggccaggccccguuucgcacgcugguucagcgcauauggacgacgacguccgacggcgaggccguugagcuagccagcgagacgcugaugaagcgcgaacugacgagcuuuguggugcugguuccccagggaacccccgacguucaguugcgccugacgaggccgcagcucaccaagguccuuaacgcgaccggggccgauagugccacgcccaccacguucgagcucgggguuaacggcaaauuuuccguguucaccacgaguaccugcgucaccuuugcugcccgcgaggagggcgugucguccagcaccagcacccagguccagauccuguccaacgcgcucaccaaggcgggccaggcggccgccaacgccaagacgguguacggggaaaauacccaucgcaccuucucuguggucgucgacgauugcagcaugcgggcggugcuccggcgacugcaggucggcgggggcacccucaaguucuuccucacgacccccguccccagucugugcgucaccgccaccggucccaacgcgguaucggcgguauuucuccugaaaccccagaagauuugccuggacuggcugggucauagccaggggucuccuucagccgggagcucggccucccgggccucugggagcgagccaacagacagccaggacuccgcgucggacgcggucagccacggcgauccggaagaccucgauggcgcugcccgggcgggagaggcgggggccuugcaugccuguccgaugccgucgucgaccacgcgggucacucccacgaccaagcgggggcgcucggggggcgaggaugcgcgcgcggacacggcccuaaagaaaccuaagacggggucgcccaccgcacccccgcccgcagauccagucccccuggacacggaggacgacuccgaugcggcggacgggacggcggcccgucccgccgcuccagacgcccggagcggaagccguuacgcguguuacuuucgcgaccucccgaccggagaagcaagccccggcgccuucuccgccuuccgggggggcccccaaaccccguaugguuuuggauuccccugacggggcggggccuuggcggccgcccaacucucgcaccaucccggguuaauguaaauaaacuugguauugcccaacacuuucccgcgugucgcgugugguucaugugugugccuggcgcccccacccucggguucguguauuuccuuucccuguccuuauaaaagccguauguggggcgugacggaaccaccccgcgugccaucacggccaaggcgcgggaugcuccgcaacgacagccaccgggccguguccccggaggacggccagggacgggucgacgacggacggccacaccucgcgugcgugggggcccuggcgcggggguucaugcauaucuggcuucaggccgccacgcuggguuuugcgggaucggucguuaugucgcgcgggccguacgcgaaugccgcgucuggggcguucgccgucgggugcgccgugcugggcuuuaugcgcgcacccccuccccucgcgcggcccaccgcgcggauauacgccuggcucaaacuggcggccgguggagcggcccuuguucuguggagucucggggagcccggcacgcagccgggggccccggccccgggcccggccacccagugccuggcacugggcgccgccuaugcggcgcuccuggugcucgccgaugacgucuauccgcucuuucuccucgccccggggccccuguucgucggcacccuggggauggucgucggcgggcugacgaucggaggcagcgcgcgcuacugguggaucggugggcccgccgcggccgcccuggccgcggcgguguuggcgggcccgggggcgaccaccgccagggacugcuuuuccagggcuugccccgaccaccgccgcgucugugucaucaccgcaggcgagucucuuucccgccgccccccggaggacccagagcgacccgggguucccgggcccccgucccccccgaccccccaacgaucccacgggccgccggccgaugaggucgcaccggccagggucgcgcggcccgaaaacgucugggugcccguggucaccuuucugggggcgggcgcgcuugccgucaagacggugcgagaacaugcccggggaacgccgggcccgggccugccgcuguggccccagguguuucucggaggccauguggcgguggcccugacggagcugugucaggcgcuuccgcccugggaccuuacggacccgcugcuguuuguucacgccggacugcaggucaucaaccucggguugguguuucgguuuuccgagguugucguguaugcggcgcuagggggugccguguggauuucguuggcgcaggugcuggggcuccggcgucgccugcacaggaaggaccccggggacggggcccgguuggcggcgacgcuucggggccucuucuucuccguguacgcgcugggguuuggggugggggugcugcugugcccuccggggucaacgggcgggcggucgggcgauugauauauuuuucaauaaaaggcauuagucccgaagaccgccggugugugaugauuucgccauaacacccaaaccccggauggggcccggguauaaauuccggaaggggacacgggcuacccucacuaucgagggcgcuuggucgggaggccgcaucgaacgcacacccccauccggugguccguguggaggucguuuucaugcccggucucgcuuugccgggaacgcuagccgaucccucgcgagggggaggcgucgggcauggccccggggcgggugggccuugccgugguccuguggagccuguuguggcucggggcggggguguccgggggcucggaaacugccuccaccgggcccacgaucaccgcgggagcggugacgaacgcgagcgaggcccccacaucggggucccccgggucagccgccagcccggaggucacccccacaucgaccccaaaccccaacaaugucacacaaaacaaaaccacccccaccgagccggccagccccccaacaacccccaagcccaccuccacgcccaaaagcccccccacguccacccccgaccccaaacccaagaacaacaccacccccgccaagucgggccgccccacuaaaccccccgggcccguguggugcgaccgccgcgacccauuggcccgguacggcucgcgggugcagauccgaugccgguuucggaauuccacccgcauggaguuccgccuccagauauggcguuacuccauggguccgucccccccaaucgcuccggcucccgaccuagaggagguccugacgaacaucaccgccccacccgggggacuccugguguacgacagcgcccccaaccuaacggacccccacgugcucugggcggagggggccggcccgggcgccgacccuccguuguauucugucaccgggccgcugccgacccagcggcugauuaucggcgaggugacgcccgcgacccagggaauguauuacuuggccuggggccggauggacagcccgcacgaguacgggacgugggugcgcguccgcauguuccgccccccgucucugacccuccagccccacgcggugauggagggucagccguucaaggcgacgugcacggccgccgccuacuacccgcguaaccccguggaguuugucugguucgaggacgaccaccagguguuuaacccgggccagaucgacacgcagacgcacgagcaccccgacggguucaccacagucucuaccgugaccuccgaggcugucggcggccagguccccccgcggaccuucaccugccagaugacguggcaucgcgacuccgugacguucucgcgacgcaaugccaccgggcuggcccuggugcugccgcggccaaccaucaccauggaauuugggguccgcauuguggucugcacggccggcugcguccccgagggcgugacguuugccugguuccugggggacgaccccucaccggcggcuaagucggccguuacggcccaggagucgugcgaccaccccgggcuggcuacgguccgguccacccugcccauuucguacgacuacagcgaguacaucugucgguugaccggauauccggccgggauucccguucuagaacaccacggcagucaccagcccccacccagggaccccaccgagcggcaggugaucgaggcgaucgaguggguggggauuggaaucgggguucucgcggcggggguccuggucguaacggcaaucguguacgucguccgcacaucacagucgcggcagcgucaucggcgguaacgcaagacccccccguuaccuuuuuaauaucuauauaguuugguccccccucuaucccgcccaccgcugggcgcuauaaagccgccacccucucuucccucaggucauccuuggucgaucccgaacgacacacggcguggagcaaaacgccucccccugagccgcuuuccuaccaacacaacggcaugccucugcgggcaucggaacacgccuaccggccccugggccccgggacaccccccaugcgggcucggcuccccgccgcggccuggguuggcgucgggaccaucaucgggggaguugugaucauugccgcguugguccucgugcccucgcgggccucgugggcacuuuccccaugcgacagcggauggcacgaguucaaccucgggugcauauccugggauccgacccccauggagcacgagcaggcggucggcggcuguagcgccccggcgacccugaucccccgcgcggcugccaaacagcuggccgccgucgcacgcguccagucggcaagauccucgggcuacuggugggugagcggagacggcauucgggccugccugcggcucgucgacggcgucggcgguauugaccaguuuugcgaggagcccgcccuucgcauaugcuacuauccccgcagucccgggggcuuuguucaguuuguaacuucgacccgcaacgcgcuggggcugccgugaggcgcguguacugcggucugucucgucuccucuucuccccuucccucccccuccgcaucccaggaucacaccggucaacgaggguuggggggguccggcacggacccaaaauaauaaacacacaaucacgugcgauaaaaagaacacgcgguccccugugguguuuuugguuauuuuuauuaaaucucgucgacaaacagggggaaaggggcguggucuagcgacggcagcacgggcggaggcguucaccggcuccggcguccuucgcguuuaagcuuggucaggagggcgcucagggcggcgacguuggucgggccgucguuggucagggcguuggcucgauggcgggcgaggacgggcgaggggcucaacggcgggggcgggggcccggugcggcccgggggggaaaauagggcggaucccccccagucguacaggggauuuuccgccucaauguacggggaggccggcgcugcauucgccguguucacgcagacguuuucguagacccgcauccaugguauuuccucguagacacgccccccguccucgcucaccgucucguauauugacucgucguccucguagggggcgugccguucgcgggccgaggcggcguggguggcuuugcggcgggcgucgucgucgucgucgucggccgucagauacguggcuuccaucuggucggguucucccuccggggcggguccccacacccguggccgaucgaggcuccccagagacgcgcgccggacgaggagggggcacgucgccgccggcggucgccugucgggucccgcgacguuacgggccgggaggcgcgggggcaccucccccaugugcguguaauacguggccggcuguguggccgcagcggggggcucggcgaccgggucguucgcauccggaagcgggggccccgcgccguccgcgcggcgccuccggaaccuccggguggacgcgggggucgaguguaggcgaggucgggggaggggcgggggcucguugucgcgccgcgcccgcugaaucuuuucccgacaggucccaccccccgcgcgaugcccccccgggccgcuggccaugucguccgggggaggccccgcggaccacgucguccggcgagacgccacgagccgcaggauggacucguaguggagcgacggcgccccguugcggagcagauccgcggccagggcggccccgaaccaagccuugaugcucaacuccauccgggcccagcugggggcggucaucguggggaacaggggggcggugguccgacagaaacgcuccuggcuguccaccgcggcccgcagauacucguuguucaggcugucgguggcccagacgccguacccggugagggucgcguugaugauauacugggcguggugauggacgaucgacagaaccuccaccguggauacgacgguauccacggucccguacguaccgccgcuccgcuugccggucugccacagguuggcuaggcgcgucagguggcccaggacgucgcugaccgccgcccugagcgccaugcacugcauggagccggucgugccgcugggaccccgguccagauggcgcgcgaacguuuccgcgggcgccuccgggcugccgccgagcgggaggaaccggcgauuggagggacucagccggugacauacgugcuuguccgucguccacagcauccaggacgcccaccgguacagcacggagacguaggccaggagcucguugagccgcagugcggugucggugcuggggcggcuuggguccgccgggcgcauaaagaacauguacugcugaauccgauggagggcgucgcgcaggccggccacgguggcggcguacuuggccgccacggccccgcucuugaacggggugcgcgccagcagcuuuggcgccagggugggccgcagcagcacgugaaggcuggggucgcagucgcccacgggguccucggggacguccaggccgcugggcaccaccgucugcagguacuuccaguacugcgugaggauggcgcggcucaacuggccgccgggcagcuccaccucgcccagcgccuggguggcggccgaagcguagugccggauguacucguagugcgggucgcuggcgagcccguccacgaucaaacucucgggaaccguguuguguugccgcgcggccaaccggacgcugcgaucggugcaggucagaaacgccggcugcgcgucgucggagcgcugccgcaaggcgcccacggccgcgcuaaggagccccuccgggguggggagcagacacccgccgaagaugcgccgcucgggaacgcccgcguugucgccgcggaucagguuggcaggcgucaggcaccgcgccagccgcagggagcucgcgccgcgcguccggcgcugcauggugacgcccguucggucgggacccgccggucggaguuaugccgcguccagggccaucggggcgcuuuuuaucgggaggagcuuaugggcguggcgggccucccagcccggucgcgcgccuccccgacacgugcgcccgcagggcggcggcccccucgucucccaucagcaguuuccuaaacugggacaugauguccaccacgcggacccgcgggcccaacacggacccgccgcuuacgggggcgggggggaagggcuccagguccuugagaagaaaggcggggucugccgucccggacacgggggcccggggcgcugaggaggcggggcgcagauccacgugcuccgcggccgcgcggacguccgcccagaacuuggcggggguggugcgcgcguacaggggcugggucgcucggaggacgcacgcguagcgcagggggguguacgugcccaccucgggggccgugaaucccccgucaaacgcggccagugucacgcacgccaccacggugucggcaaagcccagcagccgcugcaggacgagcccggcggccagaauggcgcgcguggccgccgcgucgucccggcgccggugcgcguccccgcacgcccgggcguacuuuaaggucacggucgccagggccgugugcagcgcguacaccgcagcgcccagcacggcguugagcccgcuguuggcgagcagccggcgcgcugcggugucgcccagcgccucgugcucggcccccacgaccgcggggcuucccaggggcagggcgcgaaacagcuccucccgcgccacguccgcaaaggcgggguggugcacgugcgggugcaggcgcgcccccacgaccaccgagagccacuggaccgucugcuccgccaucaccgccagcacauccagcacgcgccccaggaaggcggccucccgcgucaaaacgcaccggacggcgucgggauugaagcgggcgagcagggccccgguggccagguacgucaugcggccggcauagcgggcggccacgcgacagucgcgguccagcagcgcgcgcaccccgggccaguacagcagggaccccagcgagcugcggaacaccgcggcgucggggccggauuggggggacacuaacccccccgcgcucaguaacggcacggccgcggccccgacgggacgcaacgccgugaggcucgcgaacugccgccucagcucggccgcccugucguccaggucagacccgcgcgccuccgcgugaaggcgcgucccgcacacccacccguugauggccagccgcacgacggcauccgccaaaaagcucaucgccugggcggggcugguuuuuguucgacgauccgucaggucaagaaucccaucgcccgugauauaccaggccaacgccucgcccugcugcaggguuuggcggaaaaacaccgcgggguugucgggggaggcgaagugcaugacccccacgcgcgauaacccgaacgcgcuauccggacacggguaaaacccggccggaugccccagggcuagggcggagcgcacggacucgucccacacggcaaccugaggggccagucgauccaacgggaaugccgcccggagcuccgggcccggcacgcgucccuccagaaccuccaccuugggcggggaacgggccccgccgccguccuccggcccgacggcuuccggguagucguccuccucguacugcagcuccucuaggaacagcggcgacggcgccacccgcgaaccgccgacccgccccaaaauagcccgcgcgucgacgggacccagguauccccccugccgggccugcggaggaccgcggggaaccucaucaucaucguccaggcgaccgcgcaccgacuggcuacgggccgcaucgggcccggggcgcugccgggacgcucggcgaugggaugugggcggggcuuccgacgcgcgccgucgucgggcucgcgggccuucccgucgacggcgcacgggcggcucgucgcccgccaucuccuccagagccucuagcucgcugucgucauccccgcggaacaccgcacgcagguaccccaugaaccccaccccaucgcccgcuggcucguccgccacgggcgaggcgcgggggcggguggaugcgcgccuccugcgccccgcggguucgcgagccgacaugguggcgauagacgcggguuaucggauguccgcuaccccccaaaaaagaaaaagaccccacagcgcggauggaggccgggguaggugccgccggacccccucgcgaugggaauggacgggagcgacggggccggcgcaaaaaaacgcaguaucucccgcgaaggcuacccgccgccccagcccccggccaaaugcggaaacggucccgcgcucucgccuuuauacgcgggccgcccugcgacacaaucacccguccgugguuucgaaucuacacgacaggcccgcagacgcggcuaacacacacgccggcaacccagaccccaguggguugguugcgcggucccgucuccuggcuaguucuuucccccaccaccaaauaaucagacgacaaccgcagguuuuguaauguaugugcucguguuuauuguggauacgaaccggugacgggaggggaaaacccagacgggggaugcggguccggucgcgcccccuacccaccguacucgucaauuccaagggcaucgguaaacaucugcucaaacucgaagucggccauauccagagcgccguagggggcggagucgugggggguaaaucccggccccggggaauccccgucccccaacauguccagaucgaaaucgucuagcgcgucggcaugcgccaucgccacguccucgccgucuaaguggagcucgucccccaggcugacaucggucgggggggccgucgacagucugcgcgugugucccgcggggagaaaggacaggcgcggagccgccagccccgccucuucgggggcgucgucguccgggagaucgagcaggcccucgaugguagacccguaauuguuuuucguacgcgcgcggcuguacgcguguucccgcaugaccgccucggagggcgaggucgugaagcuggaauacgaguccaacuucgcccgaaucaacaccauaaaguacccagaggcgcgggccugguugccaugcagggugggaggggucgucaacggcgccccuggcuccuccguagccgcgcugcgcaccagcgggagguuaaggugcucgcgaaugugguuuagcucccgcagccggcgggccucgauuggcacuccccggacggugagcgcuccguugacgaacaugaagggcuggaacagacccgccaacugacgccagcucuccaggucgcaacagaggcagucaaacaggucgggccgcaucaucugcucggcguacgcggcccauaggaucucgcgggucaaaaauagauacaaaugcaaaaacaaaacacgcgccagacgagcggucucucgguaguaccuguccgcgaucguggcgcgcagcauuucucccaggucgcgaucgcguccgcgcaugugcgccuggcggugcagcugccggacgcuggcgcgcagguaccgguacagggccgagcagaaguuggccaacacgguucgauagcucuccucccgcgcccguagcucggcguggaagaaacgagagagcgcuucguaguagagcccgaggccgucgcggguggccggaagcguagggaaggccacgucgccgugggcgcgaaugucgauuugggugcguucggggacguacgcguccccccauuccaccacaucgcugggcagcguugauaggaauuuacacucccgguacaggucggcguuggucgguagcgccgaaaacagauccucguuccagguaucgagcaugguacauagcgcggggcccgcgcuaaagcccaagucgucgaggagacgguuaaagagggcggcgggggggacgggcauggguggggagggcaugagcugggccuggcucaggcgccccguugcguacagcgggggggccgccgggguguuuuugggacccccggccgggcgggggggcgguggcgaagcgccguccgcguucaugucggcaaacagcucgucgaccaagagguccauugggugggguugauacgggaaagacgauaucgggcuuuugaugcgaucguccccgcccgcccagagagugugggacgcccgacggcgcgggaagagaaaacccccaaacgcguuagaggaccggacggaccuuauggggggaagugggcagcgggaaccccguccguucccgaggaaugacagcccguggucgccaccacgcauuuaagcaacccgcacgggccgccccguaccucgugacuuccccccacauuggcuccugucacgugaaggcgaaccgagggcggcuguccaacccaccccccgccacccagucccgguccccgucggauugggaaacaaaggcacgcaacgccaacaccgaaugaaccccuguuggugcuuuauugucuggguacggaaguuuucacucgacgggccgucuggggcgagaagcggagcgggcuggggcucgaggucgcucgguggggcgcgacgccgcagaacgcccucgagucgccguggccgcgucgacguccugcaccacgucuggauucaccaacucguuggcgcgcugaagcagguuuuugcccucgcagaccgucacgcggaugguggugaugccaaggaguucguugaggucuucgucugugcgcggacgcgacaugucccagagcuggaccgccgccauccgggcaugcauggccgccaggcgcccgaccgcggcgcagaagacgcgcuuguuaaagccggccacccgggggguccauggcgcgucgggguuugggggggcggugcuaaagugcagcuuucuggccagccccugcgcgggugucuuggaucggguuggcgccgucgacgcgggggcgucugggagugcggcggauucuggcugggccgauuuccugccgcggguggucuccgccgccggggccgcgggggccuuagucgccacccgcuggguucggggggcccggggggcgguggugggugugcguccggccccuccggacccagcggguggcggaggcgcccgcgcaggccccgggccggacaaaaccgccccggaaacgggacgccgcguccgggggaccuccggguguucgucgucuucggaugacgagcccccguagagggcauaauccgacucgucguacuggacgaaacggaccucgccccucuggcgcgagcgugucuguagggcgccacggcgggaggugucaggcggacuaucgggacucgccauaccugaagacgggguguaguacagauccucguacucaucgcgcggaaccucccgcggacccgacuucacggagcggcgagaggucaugguuccacgaacacgcuagggucggaugcgcggacaauuaggccuggguucggacggcggggguggugcagguguggagaggucgagcgauaggggcggcccgggagagaagagaggguccgcaaaacccacuggggaugcgugaguggcccucugugggcggugggggagagucuuauaggaagugcauauaaccacaacccaugggucuaaccaauccccaggggccaagaaacagacacgccccaaacggucucgguuuccgcgaggaaggggaaguccugggacacccuccacccccaccccucaccccacacagggcggguucaggcgugcccggcagccaguagccucuggcagaucugacagacgugugcgauaauacacacgcccaucgaggccaugccuacauaaaagggcaccagggcccccggggcagacauuuggccaguguuuugggucucgcaccgcgcgcccccgaucccaucgcgcccgcccuccucgccgggcggcuccccgcgcgggcccgcgucucccgccgcuaaggcgacgagcaagacaaacaacaggcccgcccgacagacccuucugggggggcccaucgucccuaacaggaagaugagucaguggggauccggggcgauccuuguccagccggacagcuugggucggggguacgauggcgacuggcacacggccgucgcuacucgcgggggcggagucgugcaacugaaccuggucaacaggcgcgcgguggcuuuuaugccgaagguuagcggggacuccggaugggccgucgggcgcgucucucuggaccugcgaauggcuaugccggcugacuuuugcgcgauuauucacgcccccgcgcuagccagccccgggcaccacguaauacugggucuuaucgacucgggguaccgcggaaccguuauggccguggucguagcgccuaaaaggacgcgggaauuugcccccgggacccugcgggucgacgugacguuccuggacauccuggcgacccccccggcccucaccgagccgauuucccugcggcaguucccgcaacuggcgccccccccuccaaccggggccgggauacgcgaagauccuugguuggagggggcgcucggggccccaagcgugacuacggcccuaccggcgcgacgccgagggcggucccucgucuaugccggcgagcugacgccgguucagacggaacacggggacggcguacgagaagccaucgccuuccuuccaaaacgcgaggaggaugccgguuucgacauugucguccgucgcccggucaccgucccggcaaacggcaccacggucgugcagccaucccuccgcaugcuccacgcggacgccgggcccgcggccugcuauguguuggggcggucgucgcucaacgcccgcggccuccuggucguuccuacgcgcuggcuccccgggcacguaugugcguuuguuguuuacaaccuuacggggguuccugugacccucgaggccggcgccaaggucgcccagcuccugguugcgggggcggacgcucuuccuuggauccccccggacaacuuucacgggaccaaagcgcuucgaaacuaccccagggguguuccggacucaaccgccgaacccaggaacccgccgcuccugguguuuacgaacgaguuugacgcggaggcccccccgagcgagcgcgggaccggggguuuugguucuaccgguauuuagcccacagcuuuggguucguuccgggcaauaaaaaacguuuguaucgcaucuuuccuguguguaguuguuuauguuggaugccugugggucuaucacacccgccccuccaucccacaaacacaaaacacacggguuggaugaaaacacgcauuuauugacccaaaacacacggagcugcucgagaugggccagggcgaggugcgguuggggaggcuguaggucugggaacggacacgcggggacacgauuccgguuugggguccgggagggcgucgccguuucgggcggcaggcgccagcguaaccuccgggggcggcgugugggggugccccaaggagggcgccucggucaccccaaucccccccgaccggguucccccggcaaccccgaaggcggagaggccaagggcccguucggcgauggccacauccuccaugaccacgucacucucggccaugcuccgaauagccugggagacgagcacauccgcggacuugucagccgcccccacggacauguacaucugcaggaugguggccauacacguguccgccaggcgccgcaucuuguccugaugggccgccacggccccgucgaucgugggggccucgaacccggggugguggcgcgccagucguucuagguucaccaugcaggcgugguacgugcgggccaaggcgcgggccuucacgaggcgucgggugucguccagggaccccagggcgucaucgagcgugaugggggcgggaaguagcgcguuaacgaccgccagggccuccugcagccgcggcuccgccuccgagggcggaacggccgcgcggaucaucucauauuguuccucggggcgcgcuccccagccacauauagccccgagaagagaagccaucgcgggcggguacuggcccuugggcgcgcggacgcaauggggcaggaagacgggaaccgcggggagaggcgggcggccgggacucccguggaggugaccgcgcuuuaugcgaccgacgggugcguuauuaccucuucgaucgcccuccucacaaacucucuacugggggccgagccgguuuauauauucagcuacgacgcauacacgcacgauggccgugccgacgggcccacggagcaagacagguucgaagagagucgggcgcucuaccaagcgucgggcgggcuaaauggcgacuccuuccgaguaaccuuuuguuuauuggggacggaagugggugggacccaccaggcccgcgggcgaacccgacccauguucgucugucgcuucgagcgagcggacgacgucgccgcgcuacaggacgcccuggcgcacgggaccccgcuacaaccggaccacaucgccgccacccuggacgcggaggccacguucgcgcugcaugcgaacaugauccuggcucucaccguggccaucaacaacgccagcccccgcaccggacgcgacgccgccgcggcgcaguaugaucagggcgcgucccuacgcucgcucguggggcgcacgucccugggacaacgcggccuuaccacgcuauacguccaccacgaggugcgcgugcuugccgcguaccgcagggcguauuauggaagcgcgcagagucccuucugguuucuuagcaaauucgggccggacgaaaaaagccuggugcucaccacucgguacuaccugcuucaggcccagcgucuggggggcgcgggggccacguacgaccugcaggccaucaaggacaucugcgccaccuacgcgauuccccacgccccccgccccgacaccgucagcgcugcgucccugaccucguuugccgccaucacgcgguucuguugcacgagccaguacgcccgcggggccgcggcggccggguuuccgcuuuacguggagcgccguauugcggccgacguccgcgagaccagugcgcuggagaaguucauaacccacgaucgcaguugccugcgcguguccgaccgugaauucauuacguacaucuaccuggcccauuuugaguguuucagccccccgcgccuagccacgcaucuucgggccgugacgacccacgaccccaaccccgcggccagcacggagcagcccucgccccugggcagggaggccguggaacaauuuuuuugucacgugcgcgcccaacugaauaucggggaguacgucaaacacaacgugaccccccgggagaccguccuggauggcgauacggccaaggccuaccugcgcgcucgcacguacgcgcccggggcccugacgcccgcccccgcguauugcggggccguggacuccgccaccaaaaugauggggcguuuggcggacgccgaaaagcuccuggucccccgcggguggcccgcguuugcgcccgccagucccggggaggacacggcgggcggcacgccgcccccacagaccugcggaauugucaagcgccuccugagacuggccgccacggaacagcagggccccacacccccggcgaucgcggcgcuuauccguaaugcggcggugcagacuccccugcccgucuaccggauauccaugguccccacgggacaggcauuugccgcgcuggccugggacgacugggcccgcauaacgcgggacgcucgccuggccgaagcggucguguccgccgaagcggcggcgcaccccgaccacggcgcgcugggcaggcggcucacggaucgcauccgcgcccagggccccgugaugcccccuggcggccuggaugccggggggcagauguacgugaaucgcaacgagauauucaacggcgcgcuggcaaucacaaacaucauccuggaucucgacaucgcccugaaggagcccguccccuuucgccggcuccacgaggcccugggccacuuuaggcgcggggcucuggcugcgguucagcuccuguuucccgcggcccgcguggaccccgacgcauaucccuguuauuuuuucaaaagcgcaugucggcccggcccggcguccguggguuccggcagcggacucggcaacgacgacgacggggacugguuucccugcuacgacgacgccggugaugaggagugggcggaggacccgggcgccauggacacaucccacgaucccccggacgacgagguugccuacuuugaccugugccacgaagucggccccacggcggaaccucgcgaaacggauucgcccguguguuccugcaccgacaagaucggacugcgggugugcaugcccguccccgccccguacgucguccacgguucucuaacgaugcgggggguggcacgggucauccagcaggcggugcuguuggaccgagauuuuguggaggccaucgggagcuacguaaaaaacuuccuguugaucgauacggggguguacgcccacggccacagccugcgcuugccguauuuugccaaaaucgcccccgacgggccugcgugcggaaggcugcugccaguguuugugaucccccccgccugcaaagacguuccggcguuugucgccgcgcacgccgacccgcggcgcuuccauuuucacgccccgcccaccuaucucgcuuccccccgggagauccguguccugcacagccuggguggggacuaugugagcuucuuugaaaggaaggcgucccgcaacgcgcuggaacacuuugggcgacgcgagacccugacggagguccugggucgguacaacguacagccggaugcgggggggaccgucgagggguucgcaucggaacugcuggggcggauagucgcgugcaucgaaacccacuuucccgaacacgccggcgaauaucaggccguauccguccggcgggccgucaguaaggacgacuggguccuccuacagcuaguccccguucgcgguacccugcagcaaagccugucgugucugcgcuuuaagcacggccgggcgagucgcgccacggcgcggacauucgucgcgcugagcgucggggccaacaaccgccugugcguguccuugugucagcagugcuuugccgccaaaugcgacagcaaccgccugcacacgcuguuuaccauugacgccggcacgccaugcucgccguccguucccugcagcaccucucaaccgucgucuugauaacggcguacggccucgugcucgugugguacaccgucuucggugccaguccgcugcaccgauguauuuacgcgguacgccccaccggcaccaacaacgacaccgcccucguguggaugaaaaugaaccagacccuauuguuucugggggccccgacgcacccccccaacgggggcuggcgcaaccacgcccauaucugcuacgccaaucuuaucgcggguagggucgugcccuuccaggucccaccugacgccaugaaucgucggaucaugaacguccacgaggcaguuaacugucuggagacccuaugguacacacgggugcgucugguggucguagggugguuccuguaucuggcguucgucgcccuccaccaacgccgauguauguuuggcgucgugagucccgcccacaagaugguggccccggccaccuaccucuugaacuacgcaggccgcaucguaucgagcguguuccugcaguaccccuacacgaaaauuacccgccugcucugcgagcugucgguccagcggcaaaaccugguucaguuguuugagacggacccggucaccuucuuguaccaccgccccgccaucggggucaucguaggcugcgaguugaugcuacgcuuuguggccgugggucucaucgucggcaccgcuuucauaucccggggggcaugugcgaucacauacccccuguuucugaccaucaccaccugguguuuugucuccaccaucggccugacagagcuguauuguauucugcggcggggcccggcccccaagaacgcagacaaggccgccgccccggggcgauccaaggggcugucgggcgucugcgggcgcugcuguuccaucauccucucgggcaucgcagugcgauuguguuauaucgccgugguggccgggguggugcucguggcgcuucacuacgagcaggagauccagaggcgccuguuugauguaugacgucacauccaggccggcggaaaccguaacggcauaugcaaauuggaaacuguccugucuuggggcccacccacccgacgcgucauaugcaaaugaaaaucggucccccgaggccacguguagccuggaucccaacgaccccgcccaugggucccaauuggccgucccguuaccaagaccaacccagccagcguauccacccccgcccggguccccgcggaagcggaacgggguaugugauaugcuaauuaaauacaugccacguacuuauggugucugauugguccuugucugugccggagguggggcgggggccccgcccggggggcggaacgaggagggguuugggagagccggccccggcaccacggguauaaggacauccaccacccggccggugguggugugcagccguguuccaaccacggucacgcuucggugccucuccccgauucgggcccggucgcucgcuaccggugcgccaccaccagaggccauauccgacaccccagccccgacggcagccgacagcccggucauggcgacugacauugauaugcuaauugaccucggccuggaccucuccgacagcgaucuggacgaggacccccccgagccggcggagagccgccgcgacgaccuggaaucggacagcagcggggaguguuccucgucggacgaggacauggaagacccccacggagaggacggaccggagccgauacucgacgccgcucgcccggcgguccgcccgucucguccagaagaccccggcguacccagcacccagacgccucguccgacggagcggcagggccccaacgauccucaaccagcgccccacaguguguggucgcgccucggggcccggcgaccgucuugcucccccgagcagcacgggggcaagguggcccgccuccaacccccaccgaccaaagcccagccugcccgcggcggacgccgugggcgucgcaggggucggggucgcgguggucccggggcugccgaugguuugucggacccccgccggcgugcccccagaaccaaucgcaacccugggggaccccgccccggggcgggguggacggacggccccggcgccccccauggcgaggcguggcgcggcagugagcagcccgacccacccggaggccagcggacacggggcgugcgccaagcaccccccccgcuaaugacgcuggcgauugcccccccgcccgcggacccccgcgccccggccccggagcgaaaggcgcccgccgccgacaccaucgacgccaccacgcgguugguccugcgcuccaucuccgagcgcgcggcggucgaccgcaucagcgagagcuuuggccgcagcgcacaggucaugcacgaccccuuuggggggcagccguuucccgccgcgaauagccccugggccccggugcuggcgggccaaggagggcccuuugacgccgagaccagacgggucuccugggaaaccuuggucgcccacggcccgagccucuaucgcacuuuugccggcaauccucgggccgcaucgaccgccaaggccaugcgcgacugcgugcugcgccaagaaaauuucaucgaggcgcuggccuccgccgacgagacgcuggcguggugcaagaugugcauccaccacaaccugccgcugcgcccccaggaccccauuaucgggacgaccgcggcugugcuggauaaccucgccacgcgccugcggcccuuucuccagugcuaccugaaggcgcgaggccugugcggccuggacgaacuguguucgcggcggcgucuggcggacauuaaggacauugcauccuucguguuugucauucuggccaggcucgccaaccgcgucgagcguggcgucgcggagaucgacuacgcgacccuuggugucggggucggagagaagaugcauuucuaccuccccggggccugcauggcgggccugaucgaaauccuagacacgcaccgccaggaguguucgagucgugucugcgaguugacggccagucacaucgucgcccccccguacgugcacggcaaauauuuuuauugcaacucccuguuuuagguacaauaaaaacaaaacauuucaaacaaaucgccccucguguuguccuucuuugcucauggccggcggggcgugggucacggcagauggcgggggugggcccggcguacggccugggugggcggagggaacuaacccaacguauaaauccguccccguuccaaggccggugucauagugcccuuaggagcuucccgcccgggcgcauccccccuuuugcacuaugacagcgaccccccucaccaaccuguucuuacgggccccggacauaacccacguggcccccccuuacugccucaacgccaccuggcaggccgaaacggccaugcacaccagcaaaacggacuccgcuugcguggccgugcggaguuaccugguccgcgccuccugugagaccagcggcacaauccacugcuuuuucuuugcgguauacaaggacacccaccacaccccuccgcugauuaccgagcuccgcaacuuugcggaccugguuaaccacccgccgguccuacgcgaacuggaggauaagcgcggggugcggcugcggugugcgcggccguuuagcgucgggacgauuaaggacgucucuggguccggcgcguccucggcgggagaguacacgauaaacgggaucguguaccacugccacugucgguauccguucucaaaaacaugcuggaugggggccuccgcggcccuacagcaccugcgcuccaucagcuccagcggcauggccgcccgcgcggcagagcaucgacgcgucaagauuaaaauuaaggcgugaucuccaacccccccaugaauguguguaaccccccccaaaaaaauaaagagccguaacccaaccaaaccaggcguggugugaguuuguggacccaaagcccucagagacaacgcgacaggccaguauggaccgugauacuuuuauuuauuaacucacaggggcgcuuaccgccacaggaauaccagaauaaugaccaccacaaucgcgaccaccccaaauacagcauggcgccacaccacgccacaacagcccugucgccgguauggggcaugaucagacgagccgcgcgccgcgcguugggcccuguacagcucgcgcgaauugacccuaggaggccgccacgcgcccgaguuuugcguucgucgcuggucgucgggcgccaaagccccggacggcuguucggucgaacgaacggccacgacaguggcauagguuggggggugguccgacauagccucggcguacgucgggaggcccgacaagaggucccuugugaugucggguggggccacaagccugguuuccggaagaaacagggggguugccaauaacccgccagggccaaaacuccggcgcugcgcacgucguucggcgcggcgccgggcgcgccgagcggcucgcugggcggcuuggcgugagcggccccgcuccgacgccucgcccucuccggaggagguuggcggaauuggcacggacaacaggggcccagcagaguacgguggagguggguccguggggguguccagaucaauaacgacaaacggccccucguuccuaccagacaagcuaucguaggggggcgggggaucagcaaacgcguuccccgcgcuccauaaacccgcgucggguugcgccgccuccgaagccauggaugcgccccaaagccacgacucccgcgcgcuagguccuugggguaauggaaaaggcccuacuccccauccaagccagccaaguuaacgggcuacgccuucgggaaugggacuggcaccccggcggauuuuguugggcuggcaugcgucgcccaaccgagggccgcguccacgggacgcgccuuuuauaaccccgggggucauucccaacgaucacaugcaaucuaacuggcuccccucucccccccucuccccucucccccccucuccccucucccccccucuccccucucccccccucuccccucucccccccucuccccucucccccccucuccccucucccccccucuccccucucccccccucuccccucucccccccucuccccucucccccccucuccccucuccccucugcucuuuccccgugacacccgacgcugggggcguggcugccgggaggggccgcggaugggcgggccuacuugguuucccgccccccccccccccccccgaaccgccccgccggcuuugccccccuuugauccccugcuacccccaacccgugcugguggugcggguuggggggggaugugggcgggggugcgcgggaggugucgguggugguggugguggugguaguaggaaugguggugagggggggggggcgcugguuggucaaaaaagggagggacgggggccggcagaccgacggcgacaacgcuccccggcggccgggucgcggcucuuacgagcggcccggcccgcgcucccaccccccgggccguguccuugcuuuccccccgucucccccccccccgccuucuccuccuccuccucguuuuuccaaaccccgcccacccggcccggcccggcccggcccggcccggccaccgccgcccacccacccaccucgggauacccagccccggucccccguuccccgggggccguuaucuccagcgccccguccggcgcgccgccccccgccgcuaaaccccaucccgcccccgggaccccacauauaagcccccagccacacgcaagaacagacacgcagaacggcuguguuuauuuaaauaaaccaaugucggaauaaacaaacacaaacacccgcgacggggggacggaggggacggagggagggggugacgggggacgggaacagacacaaaaacaaccacaaaaaacaaccacccaccgacacccccaccccagucuccucgccuucucccacccaccccacgcccccacugagcccggucgaucgacgagcacccccgcccacgcccccgccccugccccggcgacccccggcccgcacgaucccgacaacaauaacaaccccaacggaaagcggcgggguguugggggaggcgaggaacaaccgaggggaacgggggauggaaggacgggaaguggaaguccugauacccauccuacaccccccugccuuccacccuccggccccccgcgaguccacccgccggccggcuaccgagaccgaacacggcggccgccgcagccgccgcagccgccgccgacaccgcagagccggcgcgcgcacucacaagcggcagaggcagaaaggcccagagucauuguuuauguggccgcgggccagcagacggcccgcgacaccccccccccgcccguguggguauccggccccccgccccgcgccgguccauuaagggcgcgcgugcccgcgagauaucaauccguuaagugcucugcagacaggggcaccgcgcccggaaauccauuaggccgcagacgaggaaaauaaaauuacaucaccuacccacguggugcuguggccuguuuuugcugcgucaucucagccuuuauaaaagcgggggcgcggccgugccgaucgcggguggugcgaaagacuuuccgggcgcguccgggugccgcggcucuccgggccccccugcagccggggcggccaaggggcgucggcgacauccucccccuaagcgccggccggccgcuggucuguuuuuucguuuuccccguuucgggggugguggggguugcgguuucuguuucuuuaacccgucugggguguuuuucguuccgucgccggaauguuucguucgucuguccccucacggggcgaaggccgcguacggcccgggacgaggggcccccgaccgcggcgguccgggccccguccggacccgcucgccggcacgcgacgcgaaaaaggccccccggaggcuuuuccggguucccggcccggggccugagaugaacacucgggguuaccgccaacggccggcccccguggcggcccggcccggggccccggcggacccaaggggccccggcccggggccccacaacggcccggcgcaugcgcugugguuuuuuuuuccucgguguucugccgggcuccaucgccuuuccuguucucgcuucuccccccccccuucuucacccccaguacccuccucccucccuuccucccccguuaucccacucgucgagggcgccccggugucguucaacaaagacgccgcguuuccagguagguuagacaccugcuucuccccaauagaggggggggacccaaacgacagggggcgccccagaggcuaaggucggccacgccacucgcgggugggcucguguuacagcacaccagcccguucuuuucccccccucccacccuuagucagacucuguuacuuacccguccgaccaccaacugcccccuuaucuaagggccggcuggaagaccgccagggggucggccggugucgcuguaaccccccacgccaaugacccacguacuccaagaaggcaugugucccaccccgccuguguuuuugugccuggcucucuaugcuugggucuuacugccuggggggggggagugcgggggaggggggguguggaaggaaaugcacggcgcguguguacccccccuaaaguuguuccuaaagcgaggauacggaggaguggcgggugccgggggaccggggugaucucuggcacgcgggggugggaagggucgggggagggggggauggaguaccggcccaccuggccgcgcgggugcgcgugccuuugcacaccaaccccacgucccccggcggucucuaagaagcaccgcccccccuccuucauaccaccgagcaugccuggguguggguugguaaccaacacgcccauccccucgucuccugugauucucuggcugcaccgcauucuuguuuucuaacuauguuccuguuucugucucccccccccccaccccuccgccccaccccccaacacccacgucugugguguggccgacccccuuuugggcgccccgucccgccccgccaccccucccauccuuuguugcccuauaguguaguuaaccccccccgcccuuuguggcggccagaggccaggucaguccgggcgggcaggcgcucgcggaaacuuaacacccacacccaacccacugugguucuggcuccaugccaguggcaggaugcuuucggggaucgguggucaggcagcccgggccgcggcucugugguuaacaccagagccugcccaacauggcacccccacucccacgcacccccacucccacgcacccccacucccacgcacccccacucccacgcacccccacucccacgcacccccacucccacgcacccccacucccacgcacccccacucccacgcacccccacucccacgcauccccgcgauacauccaacacagacagggaaaagauacaaaaguaaaccuuuauuucccaacagacagcaaaaauccccugaguuuuuuuuuauuagggccaacacaaaagacccgcugguguguggugcccgugucuuucacuuuuccccuccccgacacggauuggcugguguagugggcgcggccagagaccacccagcgcccgaccccccccuccccacaaacacggggggcgucccuuauuguuuucccucgucccgggucgacgcccccugcuccccggaccacgggugccgagaccgcaggcugcggaaguccagggcgcccacuagggugcccuggucgaacagcauguuccccacgggggucauccagaggcuguuccacuccgacgcgggggccgucggguacucggggggcaucacgugguuacccgcggucucggggagcagggugcggcggcuccagccggggaccgcggcccgcagccgggucgccauguuucccgucugguccaccaggaccacguacgccccgauguuccccgucuccauguccaggaugggcaggcagucccccgugauagucuuguucacguaaggcgacagggcgaccacgcuagagacccccgagaugggcagguagcgcgugaggccgcccgcggggacggccccggaagucuccgcguggcgcgucuuccgggcacacuuccucggcccccgcggcccagaagcagcgcgggggccgagggagguuuccucuugucucccucccagggcaccgacggccccgcccgaggaggcggaagcggaggaggacgcggccccggcggcggaagaggcggcccccgcgggggucggggccgaggaggaagaggcagaggaggaagaggcggaggccgccgaggacgucaggggggucccgggcccacccuggccgcgcccccccggcccugagucggagggggggugcgucgccgcccucuuggccccugccggcgcgagggggggacgcguggacuggggggagggguuuuccuggcccgacccgcgccucuuccucggacgcaccgccgccuccugcucgacagaggcggcggaggggagcggggcggcgccggagggggcggcgccgcgggagggcccgugcccacccuccacgcccggcccccccgagccgcgcgccaccgucgcacgcgcccggcacagacucuguucuugguucgcggccugagccagggacgagugcgacuggggcacacggcgcgcguccgcggggcgggcggccggcuccgccccgggggccggggcgcgggggccgggccccggaggcggcgcucgcacgcacggggccacggccgcgcgggggcgcgcgggucccgacgcggccgcggacgcggggggcccggggcggggggcggagccuggcaugggcgccgcggggggccuguggggagaggccgggggggagucgcugaucacuauggggucucuguuguuugcaaggggggcgggucuguugacaagggggcccguccggccccucggccgccccgccuccgcuucaacaaccccaaccccaaccccaacccccccggaggggccagacgccccccgcggcgccgcggcucgcgacuggcgggagccgccgccgccgcugcuguugguggugguguugguguuacugcugccguguggcccgaugggcgccgaggggggcgcuguccgagccgcggccggcuggggggcugcgugagacgccccgcccgucacggggggcgcggcggcgccucugcgugggggggcgcggggcguccggcggggggcgggcgguacguagucugcugcaagagacaacggggggcgcgaucagguuacgcccccuccccggcccgcccuuuccucgcccgcccgccuauuccucccucccccccccuccuccuccuccucccccaggguccuugccgccccccgccucaccgucguccaggucgucgucauccucguccguggugggcuccgggugggugggcgacagggcccucaccgugugcccccccagggucagguaccgcggggcgaaccgcugauugcccguccagauaaaguccacggccgugcccgcccugacggccuccucggccuccaugcgggucugggggucguucacgaucgggauggugcugaacgacccgcugggcgucacgcccacuaucagguacaccagcuuggcguugcacagcgggcagguguugcgcaauugcauccagguuuucaugcacgggaugcagaagcggugcaugcacgggaaggugucgcagcgcagguggggcgcgaucucauccgugcacacggcgcacacgucgcccucgucgcuccccccguccucucgagggggggcgcccccgcaacugccggggucuuccucgcggggggggcucccccccgagaccgcccccccauccacgcccugcggccccagcagccccgucucgaacaguuccguguccgugcuguccgccucggaggcggagucgucgucaugguggucggcguccccccgcccccccacuucggucuccgccucagagucgcugcuguccggcaggucucggucgcagggaaacacccagacauccggggcgggcuaaggggaaaaaaggggggcggguaagaauggggggggauuucccgcgucaaucagcacccacgaguucccccucucccccccccgccucacaaaguccugccccccugcuggccucggaagaggggggagaaaggggucugcaaccaaagguggucuggguccguccuuuggaucccgaccccucuucuucccucuucucccgcccuccagacgcaccggagucgggggucccacggcgucccccaaauauggcgggcggcuccuccccaccccccuagaugcgugugaguaaggggggccugcguaugagucaguggggaccacgcccccaacacggcgaccccgguccuuguguguuuguugugggggcgugucucuguguaugagucagggggucccacggcgaccccgggcccugcgucugagucaaaggggccauguguauguguugggggucuguauauauaaagucagggggucacauggcgacccccaacagggcgaccccggucccuguauauauagggucaggggguuccgcacccccuaacauggcgcccccggucccuguauauauagugucacgggguuccacgcccccuaacauggcgccccaacauggcgcccggcucccguguaugagugggggucccccaacauggcggccgguuccaguguaagggucgggggucccccaacauggcgccccccaauauggcgccccccaauauggcgccccagacauggcgcccggccccucaccucgcgcugggggcggcccucaggccggcggguacucgcuccggggcggggcuccaugggggucguaugcggcuggagggucgcggacggagggucccugggggucgcaacguaggcggggcuucuguggugaugcggagagggggcggcccgagucugccuggcugcugcgucucgcuccgagugccgaggugcaaaugcgaccagacugucgggccagggcuaacuuauaccccacgccuuuccccuccccaaaggggcggcagugacgauucccccaauggccgcgcgucccaggggaggcaggcccaccgcggggcggccccguccccggggaccaacccggcgcccccaaagaauaucauuagcaugcacggcccggcccccgauuugggggcccaacccggugucccccaaagaaccccauuagcaugccccucccgccgacgcaacaggggcuuggccugcgucggugccccggggcuucccgccuucccgaagaaacucauuaccauacccggaaccccaggggaccaaugcggguucauugagcgacccgcgggccaaugcgcgaggggccguguguuccgccaaaaaagcaauuagcauaacccggaaccccaggggagugguuacgcgcggcgcgggaggcggggaauaccgggguugcccauuaagggccgcgggaauugccggaagcgggaagggcggccggggccgcccauuaaugaguuucuaauuaccauaccgggaagcggaacaaggccucuugcaaguuuuuaauuaccauaccgggaagugggcggcccggcccauugggcgguaacucccgcccaaugggccgggccccgaagacucggcggacgcugguuggccgggccccgccgcgcuggcggccgccgauuggccagucccgcccccgaggcggcccgcccugugagggcgggcuggcuccaagcguauauaugcgcggcuccugccaucgucucuccggagagcggcuuggugcggagcucccgggagcuccgcggaagacccaggccgccucggguguaacguuagaccgaguucgccgggccggcuccgcgggccagggcccgggcacgggccucgggccccaggcacggcccgaugaccgccucggccuccgccacccggcgccggaaccgagcccggucggcccgcucgcgggcccacgagccgcggcgcgccaggcgggcggccgaggcccagaccaccagguggcgcacccggacguggggcgagaagcgcacccgcgcgggggucgcgggggucgcgggggucgcgggggucgcgggggucgcggggggcuccggcgcccccuccccgcccgcgcgucgcaggcgcaggcgcgccaggugcuccgcggugacgcgcaggcggagggcgaggcgcggcggaaggcggaaggggcgcgagggggggugggaggggucagccccgccccccgggcccacgccgggcggugggggccggggccggggggcggcggcggugggccgggccucuggcgccggcucgggcggggggcuguccggccagucgucgucaucgucgucgucggacgcggacucgggaacguggagccacuggcgcagcagcagcgaacaagaaggcgggggcccaccggcggggggcggcggcggggcggccgcgggcgcgcuccugaccgcggguuccgaguugggcguggagguuaccugggacugugcgguugggacggcgcccgugggcccgggcggccgggggcggcgggggccgcgauggcggcggcggcgggccauggagacagagagcgugccggggugguagaguuugacaggcaagcaugugcgugcagaggcgaguagugcuugccugucuaacucgcuagucucggccgcggggggcccgggcugcccgccgccaccgcuuuaaagggccgcgcgcgacccccgggggguguguuuuggggggggcccguuuucggcgucuggccgcuccuccccccgcuccuccccccgcuccuccccccgcuccuccccccgcuccuccccccgcuccuccccccgcuccuccccccgcuccuccccccgcuccuccccccgcuccuccccccgcuccuccccccgcuccuccccccgcuccuccccccgcuccuccccccgcuccuccccccgcuccuccccccgcuccuccccccgcuccuccccccgcucccgcggccccgccccccacgcccgccgcgcgcgcgcacgccgcccggaccgccgcccgccuuuuuugcgcgcgcgcgcgcccgcggggggcccgggcugccacaggugaaaccaacagagcacggcgcacuccgcacgucacacgucacgucauccaccacaccugcccaacaacacaacucacagcgacaacucaccgcgcaacaacuccuguuccucauccacacgucaccgcgcaccucccgcuccuccagacguaccccggcgcaacacaccgcuccugcuacacaccaccgcccccuccccagccccagcccuccccagccccagcccuccccggccccagcccuccccggccccagcccuccccggccccagcccuccccggccccagcccuccccggccccagcccuccccggccccagcccuccccggcgcgucccgcgcucccucggggggguucgggcaucucuaccucagugccgccaaucucaggucagagauccaaacccuccgggggcgcccgcgcaccaccaccgccccucgcccccucccgccccucgcccccucccgccccucgcccccucccgccccucgcccccucccgccccucgcccccucccgccccucgcccccucccgccccucgcccccucccgccccucgcccccucccgccccucgcccccucccgccccucgcccccucccgccccucgcccccucccgccccucgcccccucccgccccucgcccccucccgccccucgcccccucccgccccucgcccccucccgccccucgcccccucccgccccucgcccccucccgccccucgcccccucccgccccucgcccccucccgccccucgaauaaacaacgcuacugcaaaacuuaaucagguuguugccguuuauugcgucuucgggucucacaagcgccccgccccgucccggcccguuacagcaccccgucccccucgaacgcgccgccgucgucuucgucccaggcgccuucccaguccacaacuucccgccgcgggggcguggccaagcccgccuccgcccccagcaccuccacggcccccgccgccgccagcacggugccgcugcggcccguggccgaggcccagcgaaucccgggcggcgccggcggcagggcccccgggccgucgucgucgccgcgcagcaccagcgggggggcgucgucgucgggcuccagcagggcgcgggcgcaaaagucccuccgcggcccgcgccaccgggccgggccggcgcgcaccgccucgcgccccagcgccacguacacgggccgcagcggcgcgcccaggccccagcgcgcgcaggcggcgugcgagugggccuccuccucgcagaaguccggcgcgccgggcgccauggcgucggugguccccgaggccgccgcccggccguccagcgccggcagcacggcccggcgguacucgcgcggggacaugggcaccggcguguccgggccgaagcgcgugcgcacgcgguagcgcacguugccgccgcggcacaggcgcagcggcggcgcgucgggguacaggcgcgcgugcgcggccuccacgcgcgcgaagacccccgggccgaacacgcggcccgaggccagcaccgugcggcgcaggucccgcgccgccggccagcgcacggcgcacugcacggcgggcagcagcucgcacgccagguaggcgugcugccgcgacaccgcgggcccgucggcgggccagucgcaggcgcgcacgguguugaccacgaugagccgccggucgccggcgcuggcgagcagccccagaaacuccacggccccggcgaaggccaggucccgcguggacagcagcagcacgcccugugcgcccagcgccgacacgucgggggcgccgguccaauugcccgcccaggcggccguguccggcccgcacagccgguuggccagggccgccagcaggcaggacagcccgccgcgcucggcggaccacuccggcggcccccccgaggccccgccgccggccagguccucgcccggcagcggcgaguacagcaccaccacgcgcacguccucggggucggggaucuggcgcauccaggccgccaugcggcgcagcgggcccgaggcgcgcagggggccaaagaggcggcccccggcggccccguggggguggggguuaucgucgucgucgccgccgccgcacgcggccugggcggcgggggcgggcccggcgcaccgcgcggcgaucgaggccagggcccgcgggucaaacaugagggccggucgccaggggacggggaacagcgggugguccgugagcucggccacggcgcgcggggagcaguaggccuccagggcggcggccgcgggcgccgccguguggcugggccccgggggcugccgccgccagccgcccagggggucggggcccucggcgggccggcgcgacacggccacggggcgcgggcgggccugcgccgcggcggcccggggcgccgcgggcugggcgggggcgggcucgggccccgggggcguggaggggggcgcgggcgcggggaggggggcgcgggcguccgagccgggggcguccgcgccgcucuucuucgucuucgggggucgcgggccgccgccuccgggcggccgggccgggccgggacucuugcgcuugcgccccucccgcggcgcggcggaggcggcggcggccgccagcgcgucggcggcguccggugcgcuggccgccgccgccagcagggggcgcaggcucugguugucaaacagcagguccgcggcggcggcggccgcggagcucggcaggcgcgggucccgcggcagcgcggggcccagggccccggcgaccaggcucacggcgcgcacggcggccacggcggccucgcugccgccggccacgcgcagguccccgcgcaggcgcaugagcaccagcgcgucgcgcacgaaccgcagcucgcgcagccacgcgcgcaggcggggcgcgucggcgugcggcggcggcggggaagcggggcccgcgggucccuccggccgcggggggcuggcgggccgggccccggccagccccgggacggccgccaggucgccgucgaagcccucggccagcgccuccaggaucccgcggcaggcggccaggcacucgacggccacgcggccggccugggcgcggcgcccggcgucgucgucggcgucggcguggcgggcggcgucggggucgucgccccccgcgggggaggcgggcgcggcggacagccgccccagggcggcgaggauccccgcggcgccguacccggcgggcaccgcgcgcucgcccggugcggcggcggcgacggcggcgacccccucgucaucugcgccggcgccggggcuccccgcggcccccgucagcgccgcguucucgcgcgccaacaggggcgcguaggcgcggcgcaggcuggucagcaggaagcccuucugcgcgcggucguaucggcggcucauggccacggcggccgccgcgugcgccaggccccagccgaagcggccggccgccauggcguagcccagguggggcacggcccgcgccacgcugccggugaugaaggagcugcuguugcgcgcggcgcccgagauccggaagcaggccugguccagcgccacguccccggggaccacgcgcggguucuggagccaccccauggccuccgcguccgggguguacagcagccgcgugaucagggcguacugcugcgcggcgucgcccagcucgggcgcccacacggccgccggggcgcccgaggccucgaaccggcgucgcgccuccuccgccucgggcgccccccagaggcccgggcggcugucgcccaggccgccguacagcacccgccccgggggcgggggcccggcgccgggccacggcuccccgcugacguacccgucgcgauagcgcgcguagaaggcgccggaggucgcgucggcguccagcucgacccgccggggcugcccggccgugaagcggcccguggcgucgcggccggccaccgccgcgcgggcccggcggcgcucgaugcggcccgcggaggccgcggggguccucgccgccgcccggggcuugggcgcggccucggagaggggggguggcccgggcgggggcggcguccgcccgggggcugccggcgccgcgcucgacggaccccgcccgacggcccgcgccucgcgugcguggucggccgcgucguugccgucgucguccucguccucgucggacgacgaggacgaagaggaugcggacgacgaggacgaggacccggaguccgacgaggucgaugacgccgauggccgccaccggccgugacgacgucuccgcggcggcugggccggcgggcgcggcgacaggcgguccgugggguccggauacgcgccgcguagcggggccucccguucgcggccccgggccggggcccggucgccggcggcgucggcugcgucgucguacucguccccgucaucgucgucggcucgaaaggcggggguccggggcggcgaggccgcggggucgggcgucgggaucguccggacggccuccucuaccauggaggccagcagagccagcugucgcggcgagacggcguccccggcguccucgccggcgucggugcccgccgcgggggcccucccgucccgccgggcgucgucgaggucguggggguggucggggucguggucggggucguccccgcccuccuccgucuccgcgccccacccgagggccccccgcucgucgcggucugggcucggggugggcggcggcccgucgguggggcccggggagccggggcgcugcuuguucuccgacgccaucgccgaugcggggcgauccuccggggauacggcugcgacggcggacguagcacgguaggucaccuacggacucucgauggggggagggggcgagacccacggaccccgacgacccccgccgucgacgcggaacuagcgcggaccggucgaugcuugggugggaaaaaggacagggacggccgaucccccucccgcgcuucguccgcguaucggcgucccggcgcggcgagcgucugacggucugucucuggcggucccgcgucgggucguggauccgugucggcagccgcgcuccguguggacgaucggggcguccucgggcucauauagucccaggggccggcgggaaggaggagcagcggaggccgccggccccccgcccccccggcgggcccaccccgaacggaauuccauuaugcacgaccccgccccgacgccggcacgccgggggcccguggccgcggcccguuggucgaacccccggccccgcccauccgcgccaucugccaugggcggggcgcgagggcggguggguccgcgccccgccccgcauggcaucucauuaccgcccgauccggcgguuuccgcuuccguuccgcaugcuaacgaggaacgggcagggggcggggcccgggccccgacuucccgguucggcgguaaugagauacgagccccgcgcgcccguuggccguccccgggccccccggucccgcccgccggacgccgggaccaacgggacggcgggcggcccaagggccgcccgccuugccgcccccccauuggccggcgggcgggaccgccccaagggggcggggccgccggguaaaagaagugagaacgcgaagcguucgcacuucgucccaauauauauauauuauuagggcgaagugcgagcacuggcgccgugcccgacuccgcgccggccccgggggcgggcccgggcggcggggggcgggucucuccggcgcacauaaaggcccggcgcgaccgacgcccgcagacggcgccggccacgaacgacgggagcggcugcggagcacgcggaccgggagcgggagucgcagagggccgucggagcggacggcgucggcaucgcgacgccccggcucgggaucgggaucgcaucggaaagggacacgcggacgcgggggggaaagacccgcccaccccacccacgaaacacaggggacgcaccccgggggccuccgacgacagaaacccaccgguccgccuuuuuugcacggguaagcaccuugggugggcggaggagggggggacgcgggggcggaggaggggggacgcgggggcggaggaggggggacgcgggggcggaggaggggggacgcgggggcggaggaggggggacgcgggggcggaggagggggcucacccgcguucgugccuucccgcaggaggaacguccucgucgaggcgaccggcggcgaccguugcguggaccgcuuccugcucgucgggcggggggaagccacugugguccuccgggacguuuucuggauggccgacauuuccccaggcgcuuuugcgccuuguguaaaagcgcggcgucccgcucuccgauccccgccccugggcacgcgcaagcgcaagcgcccuucccgcccccucucaucggagucugagguagaauccgauacagccuuggagucugaggucgaauccgagacagcaucggauucgaccgagucuggggaccaggaugaagccccccgcaucgguggccguagggccccccggaggcuuggggggcgguuuuuucuggacaugucggcggaauccaccacggggacggaaacggaugcgucggugucggacgaccccgacgacacguccgacuggucuuaugacgacauucccccacgacccaagcgggcccggguaaaccugcggcucacgagcucucccgaucggcgggaugggguuauuuuuccuaagauggggcggguccggucuacccgggaaacgcagccccgggcccccaccccgucggccccaagcccaaaugcaaugcuacggcgcucggugcgccaggcccagaggcggagcagcgcacgauggacccccgaccugggcuacaugcgccaguguaucaaucagcuguuucggguccugcgggucgcccgggacccccacggcagugccaaccgccugcgccaccugauacgcgacuguuaccugaugggauacugccgagcccgucuggccccgcgcacguggugccguuugcugcagguguccggcggaaccuggggcaugcaccugcgcaacaccauacgggagguggaggcucgauucgacgccaccgcggaacccgugugcaagcuuccuuguuuggagaccagacgguacggcccggagugugaucuuaguaaucucgagauucaucucagcgcgacaagcgaugaugaaaucuccgaugccaccgaucuggaggccgccgguucggaccacacgcucgcgucccaguccgacacggaggaugcccccucccccguuacgcuggaaaccccagaaccccgcgggucccucgcugugcgucuggaggaugaguuuggggaguuugacuggaccccccaggagggcucccagcccuggcugucugcggucguggccgauaccagcuccguggaacgcccgggcccauccgauucuggggcgggucgcgccgcagaagaccgcaagugucuggacggcugccggaaaaugcgcuucuccaccgccugccccuauccgugcagcgacacguuucuccggccgugaguccggucgccccgacccccuuguauguccccaaaauaaaagaccaaaaucaaagcguuugucccagcgucuuaauggcgggaagggcggagagaaacagaccacgcggacaugggggguguuuggggguuuauuggcaccgggggcuaaagggugguaaccggauagcagaugugaggaagucggggccguucgccgcgaacggcgaucagagggucaguuucuugcggaccacggcccggcgauguggguugcucgucugggaccucgggcaugcccauacacgcacaacacggacgccgcaccggaugggacgucguaagggggccugggguagcugggugggguuugugcagagcaaucagggaccgcagccagcgcauacaaucgcgcucccguccguuugucccgggcaguaccacgccguacugguauucguaccggcugagcagggucuccagggggugguugggggccgcggggaacgggguccacgccacgguccacucgggcaaaaaccgagucggcacggcccacgguucucccacccacgcgucuggggucuugauggcgauaaaucuuaccccgagccggauuuuuugggcguauucgagaaacggcacacacagauccgccgcgccuaccacccacaagugguagaggcgaggggggcuggguuggucucggugcagcagucggaagcacgccacggcguccacgaccucggugcucuccaaggggcuguccuccgcaaacaggcccguggugguguuuggggggcagcgacaggaccuagugcgcacgaucgggcggguggguuuggguaaguccaucagcggcucggccaaccgucgaagguuggccggacgaacgacgaccgggguacccagggguucugaugccaaaaugcggcacugccuaagcaggaagcuccacagggccgggcuugcgucgacggaaguccggggcagggcguuguucuggucaaggagggucauuacguugacgacaacaacgcccauguugguauauuacaggcccguguccgauuuggggcacuugcagauuuguaaggccacgcacggcggggagacaggccgacgcgggggcugcucuaaaaauuuaagggcccuacgguccacagacccgccuucccgggggggcccuuggagcgaccggcagcggaggcguccgggggaggggagggugauuuacggggggguaggucagggggugggucgucaaacugccgcuccuuaaaaccccggggcccgucguucggggugcucguugguuggcacucacggugcggcgaauggccugucguaaguuuugucgcguuuacgggggacagggcaggaggaaggaggaggccgucccgccggagacaaagccgucccggguguuuccucauggccccuuuuauaccccagccgaggacgcgugccuggacuccccgcccccggagacccccaaaccuucccacaccacaccacccagcgaggccgagcgccugugucaucugcaggagauccuugcccagauguacggaaaccaggacuaccccauagaggacgaccccagcgcggaugccgcggacgaugucgacgaggacgccccggacgacguggccuauccggaggaauacgcagaggagcuuuuucugcccggggacgcgaccgguccccuuaucggggccaacgaccacaucccucccccguguggcgcaucuccccccgguauacgacgacgcagccgggaugagauuggggccacgggauuuaccgcggaagagcuggacgccauggacagggaggcggcucgagccaucagccgcggcggcaagccccccucgaccauggccaagcuggugacuggcaugggcuuuacgauccacggagcgcucaccccaggaucggaggggugugucuuugacagcagccauccagauuacccccaacggguaaucgugaaggcggggugguacacgagcacgagccacgaggcgcgacugcugaggcgacuggaccacccggcgauccugccccuccuggaccugcaugucgucuccggggucacgugucugguccuccccaaguaccaggccgaccuguauaccuaucugaguaggcgccugaacccacugggacgcccgcagaucgcagcggucucccggcagcuccuaagcgccguugacuacauucaccgccagggcauuauccaccgcgacauuaagaccgaaaauauuuuuauuaacacccccgaggacauuugccugggggacuuuggcgccgcgugcuucgugcaggguucccgaucaagccccuuccccuacggaaucgccggaaccaucgacaccaacgcccccgagguccuggccggggauccguauaccacgaccgucgacauuuggagcgccggucuggugaucuucgagacugccguccacaacgcguccuuguucucggccccccgcggccccaaaaggggcccgugcgacagucagaucacccgcaucauccgacaggcccagguccacguugacgaguuuuccccgcauccagaaucgcgccucaccucgcgcuaccgcucccgcgcggccgggaacaaucgcccgccguacacccgaccggccuggacccgcuacuacaagauggacauagacgucgaauaucugguuugcaaagcccucaccuucgacggcgcgcuucgccccagcgccgcagagcugcuuuguuugccgcuguuucaacagaaaugaccgcccccugggggcggugcuguuugcggguuggcacaaaaagaccccgauccgcgucugugguguuuuuggcaucaugucgcagggcgccaugcgugccguuguucccauuaucccauuccuuuugguucuugucgguguaucggggguucccaccaacgucuccuccaccacccaaccccaacuccagaccaccggucgucccucgcaugaagcccccaacaugacccagaccggcaccaccgacucucccaccgccaucagccuuaccacgcccgaccacacaccccccaugccaaguauuggacuggaggaggaggaagaggaggagggggccggggacggcgaacaucuugaggggggagaugggacccgugacacccuaccccaguccccgggcccagccuucccguuggcugaggacgucgagaaggacaaacccaaccgucccguagucccaucccccgaucccaacaacucccccgcgcgccccgagaccagucgcccgaagacaccccccaccauuaucgggccgcuggcaacucgccccacgacccgacucaccucaaagggacgacccuugguuccgacgccucaacauaccccgcuguucucguuccucacugccucccccgcccuggacacccucuucgucgucagcaccgucauccacaccuuaucguuuuuguguauuggugcgauggcgacacaccuguguggcgguugguccagacgcgggcgacgcacacacccuagcgugcguuacgugugccugccguccgaacgcggguaggguauggggcgggggauggggagagcccacaugcggaaagcaagaacaauaaaggcggugguaucuaguugauaugcaucucuggguguuuuugggguguggcggacgcggggcggucauuggacggggugcaguuaaauacaugcccgggacccaugaagcaugcgcgacuuccgggccucagaacccacccgaaacggccaacggacgucugagccaggccuggcuauccggagaaacagcacacgacuuggcguucugugugucgcgaugucucugcgcgcagucuggcaucuggggcuuuugggaagccucgugggggcuguucuugccgccacccaucggggaccugcggccaacacaacggaccccuuaacgcacgccccaguguccccucaccccagcccccuggggggcuuugccgucccccucguagucggugggcugugcgccguaguccugggggcggcaugucugcuugagcuccugcgucguacgugccgcgggugggggcguuaccaucccuacauggacccaguugucguauaauuucccccccccccccccuucuccgcgugggugaugucggguccaaacucccgacaccaccagcuggcaugguauaaaucaccggugcgccccccaaaccauguccggcagggggaugggggggcaaugcggagggcacccaacaacaccgggcuaaccaggaaauccguggccccggcccccaauaaagaucgcgguagcccggccgugugacacuaucguccauaccgaccacaccgacgaaucccccaagggggaggggccauuuuacgaggaggagggguauaacaaagucugucuuuaaaaagcagggguuagggaguuguucggucauaagcuucagcgcgaacgaccaacuaccccgaucaucaguuauccuuaaggucucuuuuguguggugcguuccgguauggggggggcugccgccagguugggggccgugauuuuguuugucgucauagugggccuccaugggguccgcagcaaauaugccuugguggaugccucucucaagauggccgaccccaaucgcuuucgcggcaaagaccuuccgguccuggaccagcugaccgacccuccggggguccggcgcguguaccacauccaggcgggccuaccggacccguuccagccccccagccucccgaucacgguuuacuacgccguguuggagcgcgccugccgcagcgugcuccuaaacgcaccgucggaggccccccagauuguccgcggggccuccgaagacguccggaaacaacccuacaaccugaccaucgcuugguuucggaugggaggcaacugugcuauccccaucacggucauggaguacaccgaaugcuccuacaacaagucucugggggccugucccauccgaacgcagccccgcuggaacuacuaugacagcuucagcgccgucagcgaggauaaccugggguuccugaugcacgcccccgcguuugagaccgccggcacguaccugcggcucgugaagauaaacgacuggacggagauuacacaguuuauccuggagcaccgagccaagggcuccuguaaguacgcccucccgcugcgcauccccccgucagccugccucuccccccaggccuaccagcagggggugacgguggacagcaucgggaugcugccccgcuucauccccgagaaccagcgcaccgucgccguauacagcuugaagaucgccggguggcacgggcccaaggccccauacacgagcacccugcugcccccggagcuguccgagacccccaacgccacgcagccagaacucgccccggaagaccccgaggauucggcccucuuggaggaccccguggggacgguggcgccgcaaaucccaccaaacuggcacauaccgucgauccaggacgccgcgacgccuuaccaucccccggccaccccgaacaacaugggccugaucgccggcgcggugggcggcagucuccuggcagcccuggucauuugcggaauuguguacuggaugcgccgccacacucaaaaagccccaaagcgcauacgccucccccacauccgggaagacgaccagccguccucgcaccagcccuuguuuuacuagauacccccccuuaaugggugcgggggggucaggucugcgggguugggaugggaccuuaacuccauauaaagcgagucuggaaggggggaaagguggacagucgauaagucgguagcgggggacgcgcaccuguuccgccugucgcacccacagcuuuuuuugcgaaccgucccguuccgggaugccgugccgcccguugcagggccuggugcucgugggccucugggucugugccaccagccugguuguccguggccccacggucagucugguaucaaacucauuuguggacgccggggccuuggggcccgacggcguaguggaggaagaccugcuuauucucggggagcuucgcuuugugggggaccaggucccccacaccaccuacuacgaugggggcguagagcuguggcacuaccccaugggacacaaaugcccacgggucgugcaugucgucacggugaccgcgugcccacgucgccccgccguggcauucgcccugugucgcgcgaccgacagcacucacagccccgcauaucccacccuggagcucaaucuggcccaacagccgcuuuugcggguccagagggcaacgcgggacuaugccgggguguacguguuacgcguaugggucggugacgcgccaaacgccagccuguuuguccuggggauggccauagccgccgaagggacucuggcguacaacggcucggccuauggcuccugcgacccgaaacugcuuccgucuucggccccgcgucuggccccggcgagcguauaccaacccgccccuaaccaggccuccacccccucgaccaccaccuccacccccucgaccaccauccccgcucccucgaccaccauccccgcuccccaagcaucgaccacgcccuuccccacgggagauccaaaaccacaaccucccggggucaaccacgaacccccaucuaaugccacgcgagcgacccgcgacucgcgauacgcgcuaacggugacccagauaauccagauagccauccccgcguccaucauagcccugguguuucuggggagcuguauuugcuuuauacacagaugucaacgccgcuaccgacgcucccgucgcccgauuuacagcccccagaugcccacgggcaucucaugcgcggugaacgaagcggccauggcccgccucggagccgagcucaaaucgcauccgagcaccccccccaaaucccggcgccggucgucacgcacgccaaugcccucccugacggccaucgccgaagagucggagcccgcuggggcggcugggcuuccgacgccccccguggaccccacgacacccaccccaacgccuccccuguugguauagguccacggccacuggccgggagcaccacauaaccgaccgcagucccugaguugggaauaaaccgguauuauuuaccuauauccguguaugucgauuucuuucccccccuccccggaaaccaaagaaggaagcaaagaauggaugggaggaguucaggaagccggggagagggcccgcggcgcauuuaaggcguuguuguguugacuuugccucuucuggcggguuggugcggugcuguuuguugggcucccauuuuacccgaagaucggcugcuauccccgggacauggaucgcggggcgguggugggguuucuucucgguguuuguguuguaucgugcuuggcgggaacgcccaaaacguccuggagacgggugagugucggcgaggacguuucguugcuuccagcuccggggccuacggggcgcggcccgacccagaaacuacuaugggccguggaaccccuggaugggugcggccccuuacacccgucgugggucucgcugaugccccccaagcaggugcccgagacggucguggaugcggcgugcaugcgcgcuccggucccgcuggcgauggcguacgcccccccggccccaucugcgaccgggggucuacgaacggacuucguguggcaggagcgcgcggccgugguuaaccggagucugguuauucacgggguccgagagacggacagcggccuguauacccuguccgugggcgacauaaaggacccggcucgccaaguggccucggugguccugguggugcaaccggccccaguuccgaccccacccccgaccccagccgauuacgacgaggaugacaaugacgagggcgaggacgaaagucucgccggcacucccgccagcgggaccccccggcucccgccuccccccgcccccccgaggucuuggcccagcgcccccgaagucucacaugugcguggggugaccgugcguauggagacuccggaagcuauccuguuuucccccggggagacguucagcacgaacgucuccauccaugccaucgcccacgacgaccagaccuacuccauggacgucgucugguugagguucgacgugccgaccucgugugccgagaugcgaauauacgaaucgugucuguaucacccgcagcucccagaaugucuguccccggccgacgcgccgugcgccgcgaguacguggacgucucgccuggccguccgcagcuacgcgggguguuccagaacaaaccccccaccgcgcuguucggccgaggcucacauggagcccgucccggggcuggcguggcaggcggccuccgucaaucuggaguuccgggacgcguccccacaacacuccggccuguaucugugugugguguacgucaacgaccauauucacgccuggggccacauuaccaucagcaccgcggcgcaguaccggaacgcggugguggaacagccccucccacagcgcggcgcggauuuggccgagcccacccacccgcacgucggggccccuccccacgcgcccccaacccacggcgcccugcgguuaggggcggugaugggggccgcccugcugcugucugcacugggguugucggugugggcguguaugaccuguuggcgcaggcgugccuggcgggcgguuaaaagcagggccucggguaaggggcccacguacauucgcguggccgacagcgagcuguacgcggacuggagcucggacagcgagggagaacgcgaccaggucccguggcuggcccccccggagagacccgacucucccuccaccaauggauccggcuuugagaucuuaucaccaacggcuccgucuguauacccccguagcgaugggcaucaaucucgccgccagcucacaaccuuuggauccggaaggcccgaucgccguuacucccaggccuccgauucguccgucuucugguaaggcgccccaucccgaggccccacgucggucgccgaacugggcgaccgccggcgagguggacgucggagacgagcuaaucgcgauuuccgacgaacgcggacccccccgacaugaccgcccgccccucgccacgucgaccgcgcccucgccacacccgcgacccccgggcuacacggccguugucuccccgauggcccuccaggcugucgacgcccccucccuguuugucgccuggcuggccgcucgguggcuccggggggcuuccggccugggggccguccugugugggauugcgugguaugugacgucaauugcccgaggcgcauaaagggccggugguccgccuagccgcagcaaauuaaaaaucgugagucacagcgaccgcaacuucccacccggagcuuucuuccggccucgaugacgucccggcucuccgaucccaacuccucagcgcgauccgacauguccgugccgcuuuaucccacggccucgccaguuucggucgaagccuacuacucggaaagcgaagacgaggcggccaacgacuuccucguacgcaugggccgccaacagucgguauuaaggcgucgacgcagacgcacccgcugcgucggcauggugaucgccugucuccucguggccguucugucgggcggauuuggggcgcuccugauguggcugcuccgcuaaaagaccgcaucgacacgcgcguccuucuugucgucucucuucccccccaucaccccgcaauuugcacccagccuuuaacuacauuaaauuggguucgauuggcaauguugucucccgguugauuuuuggguggguggggaguggguggguggggaguggguggguggggaguggguggguggggaguggguggguggggaguggguggguggggaguggguggguggggaguggguggguggggaguggguggguggggaguggguggguggggaguggcaaggaagaaacaagcccgaccaccagacagaaaauguaaccauacccaaaccgacucugggggcuguuuguggggucggaaccauaggaugaacaaaccaccccguaccacccgcacccaagggugcgguggcucaucggcaucuguccgguauggguuguuccccacccacucgcguucggacgucuuagaaucauggcgguuuucuaugccgacaucgguuuucucccccgcaauaagacacgaugcgauaaaaucuguuuguaaaauuuauuaaggguacaaauugcccuagcacaggggugggguuagggccggguccccacacccaaacgcaccaaacagaugcaggcagugggucgaguacagccccgcguacgaacacgucgaugcgugugucagacagcaccagaaagcacaggccaucaacaggucgugcaugugucgguggguuuggacgcggggggccaugguggugauaaaguuaauggccgccguccgccagggccacaggggcgacgucucuugguuggcccggagccacuggguguggaccagccgcgcguggcggcccaacauggccccuguagccgggggcgggggaucgcgcacguuugcagcgcacaugcgagacaccucgaccacgguucgaaagaaggcccggugguccgcgggcaacaucaccaggugcgcaagcgcccgggcguccagaggguagagcccugagucauccgagguuggcucaucgcccgggucuugccgcaagugcguguggguugggcuuccggugggcgggacgcgaaccgcgguguggaucccgacgcgggcccgagcguaugcuccauguuguggggagaaggggucugggcucgccaggggggcauacuugcccgggcuauacagacccgcgagccguacgugguucgcggggggugcgugggguccggggcucccggggagaccggggcucccggggagaccggggcucccugggagaccgggguugucguggaucccuggggucacgcgguacccuggggucucugggagcucgcgguacucuggguucccuagguucucgggguggucgcggaacccggggcucccggggaacacgcgguguccuggggauuguuggcggucggacggcuucagauggcuucgagaucguaguguccgcaccgacucguaguagacccgaaucuccacauugccccgccgcuugaucauuaucaccccguugcggggguccggagaucaugcgcggguguccucgaggugcgugaacaccucuggggugcaugccggcggacggcacgccuuuuaaguaaacaucugggucgcccggcccaacuggggccggggguugggucuggcucaucucgagagccacgggggggaaccacccuccgcccagagacucgggugauggucguacccgggacucaacggguuaccggauuacggggacugucggucacggucccgccgguucuucgaugugccacacccaaggaugcguugggggcgauuucgggcagcagcccgggagagcgcagcaggggacgcuccgggucgugcacggcgguucuggccgccucccgguccucacgcccccuuuuauugaucucaucgcguacgucggcguacguccugggcccaacccgcaugguguccaggaagguguccgccauuuccagggcccacgacaugcucccccccgacgagcaggaagcgguccacgcaacggucgccgccggucgccucgacgaggacguuccuccugcgggaaggcacgaacgcgggugagcccccuccuccgcccccgcguccccccuccuccgcccccgcguccccccuccuccgcccccgcguccccccuccuccgcccccgcguccccccuccuccgcccccgcguccccccuccuccgcccccgcguccccccuccuccacccccgcgucccccccuccuccgcccacccaaggugcuuacccgugcaaaaaaggcggaccgguggguuucugucgucggaggcccccggggugcguccccuguguuucguggguggggugggcgggucuuucccccccgcguccgcgugucccuuuccgaugcgaucccgaucccgagccggggcgucgcgaugccgacgccguccgcuccgacggcccucugcgacucccgcucccgguccgcgugcuccgcagccgcucccgucguucguggccggcgccgucugcgggcgucggucgcgccgggccuuuaugugcgccggagagacccgccccccgccgcccgggcccgcccccggggccggcgcggagucgggcacggcgccagugcucgcacuucgcccuaauaauauauauauauugggacgaagugcgaacgcuucgcguucucacuucuuuuacccggcggccccgcccccuuggggcggucccgcccgccggccaaugggggggcggcaaggcgggcggcccuugggccgcccgccgucccguuggucccggcguccggcgggcgggaccggggggcccggggacggccaacgggcgcgcggggcucguaucucauuaccgccgaaccgggaagucggggcccgggccccgcccccugcccguuccucguuagcaugcggaacggaagcggaaaccgccggaucgggcgguaaugagaugccaugcggggcggggcgcggacccacccgcccucgcgccccgcccauggcagauggcgcggaugggcggggccggggguucgaccaacgggccgcggccacgggcccccggcgugccggcgucggggcggggucgugcauaauggaauuccguucggggugggcccgccgggggggcggggggccggcggccuccgcugcuccuccuucccgccggccccugggacuauaugagcccgaggacgccccgaucguccacacggagcgcggcugccgacacggauccacgacccgacgcgggaccgccagagacagaccgucagacgcucgccgcgccgggacgccgauacgcggacgaagcgcgggagggggaucggccgucccuguccuuuuucccacccaagcaucgaccgguccgcgcuaguuccgcgucgacggcgggggucgucgggguccgugggucucgcccccuccccccaucgagaguccguaggugaccuaccgugcuacguccgccgucgcagccguauccccggaggaucgccccgcaucggcgauggcgucggagaacaagcagcgccccggcuccccgggccccaccgacgggccgccgcccaccccgagcccagaccgcgacgagcggggggcccucggguggggcgcggagacggaggagggcggggacgaccccgaccacgaccccgaccacccccacgaccucgacgacgcccggcgggacgggagggcccccgcggcgggcaccgacgccggcgaggacgccggggacgccgucucgccgcgacagcuggcucugcuggccuccaugguagaggaggccguccggacgaucccgacgcccgaccccgcggccucgccgccccggacccccgccuuucgagccgacgacgaugacggggacgaguacgacgacgcagccgacgccgccggcgaccgggccccggcccggggccgcgaacgggaggccccgcuacgcggcgcguauccggaccccacggaccgccugucgccgcgcccgccggcccagccgccgcggagacgucgucacggccgguggcggccaucggcgucaucgaccucgucggacuccggguccucguccucgucguccgcauccucuucguccucgucguccgacgaggacgaggacgacgacggcaacgacgcggccgaccacgcacgcgaggcgcgggccgucgggcgggguccgucgagcgcggcgccggcagcccccgggcggacgccgcccccgcccgggccacccccccucuccgaggccgcgcccaagccccgggcggcggcgaggacccccgcggccuccgcgggccgcaucgagcgccgccgggcccgcgcggcgguggccggccgcgacgccacgggccgcuucacggccgggcagccccggcgggucgagcuggacgccgacgcgaccuccggcgccuucuacgcgcgcuaucgcgacggguacgucagcggggagccguggcccggcgccgggcccccgcccccggggcgggugcuguacggcggccugggcgacagccgcccgggccucuggggggcgcccgaggcggaggaggcgcgacgccgguucgaggccucgggcgccccggcggccgugugggcgcccgagcugggcgacgccgcgcagcaguacgcccugaucacgcggcugcuguacaccccggacgcggaggccaugggguggcuccagaacccgcgcgugguccccggggacguggcgcuggaccaggccugcuuccggaucucgggcgccgcgcgcaacagcagcuccuucaucaccggcagcguggcgcgggccgugccccaccugggcuacgccauggcggccggccgcuucggcuggggccuggcgcacgcggcggccgccguggccaugagccgccgauacgaccgcgcgcagaagggcuuccugcugaccagccugcgccgcgccuacgcgccccuguuggcgcgcgagaacgcggcgcugacgggggccgcggggagccccggcgccggcgcagaugacgagggggucgccgccgucgccgccgccgcaccgggcgagcgcgcggugcccgccggguacggcgccgcggggauccucgccgcccuggggcggcuguccgccgcgcccgccucccccgcggggggcgacgaccccgacgccgcccgccacgccgacgccgacgacgacgccgggcgccgcgcccaggccggccgcguggccgucgagugccuggccgccugccgcgggauccuggaggcgcuggccgagggcuucgacggcgaccuggcggccgucccggggcuggccggggcccggcccgccagccccccgcggccggagggacccgcgggccccgcuuccccgccgccgccgcacgccgacgcgccccgccugcgcgcguggcugcgcgagcugcgguucgugcgcgacgcgcuggugcucaugcgccugcgcggggaccugcgcguggccggcggcagcgaggccgccguggccgccgugcgcgccgugagccuggucgccggggcccugggccccgcgcugccgcgggacccgcgccugccgagcuccgcggccgccgccgccgcggaccugcuguuugacaaccagagccugcgcccccugcuggcggcggcggccagcgcaccggacgccgccgacgcgcuggcggccgccgccgccuccgccgcgccgcgggaggggcgcaagcgcaagagucccggcccggcccggccgcccggaggcggcggcccgcgacccccgaagacgaagaagagcggcgcggacgcccccggcucggacgcccgcgccccccuccccgcgcccgcgccccccuccacgcccccggggcccgagcccgcccccgcccagcccgcggcgccccgggccgccgcggcgcaggcccgcccgcgccccguggccgugucgcgccggcccgccgagggccccgacccccugggcggcuggcggcggcagcccccggggcccagccacacggcggcgcccgcggccgccgcccuggaggccuacugcuccccgcgcgccguggccgagcucacggaccacccgcuguuccccguccccuggcgaccggcccucauguuugacccgcgggcccuggccucgaucgccgcgcggugcgccgggcccgcccccgccgcccaggccgcgugcggcggcggcgacgacgacgauaacccccacccccacggggccgccgggggccgccucuuuggcccccugcgcgccucgggcccgcugcgccgcauggcggccuggaugcgccagauccccgaccccgaggacgugcgcgugguggugcuguacucgccgcugccgggcgaggaccuggccggcggcggggccucgggggggccgccggagugguccgccgagcgcggcgggcuguccugccugcuggcggcccuggccaaccggcugugcgggccggacacggccgccugggcgggcaauuggaccggcgcccccgacgugucggcgcugggcgcacagggcgugcugcugcuguccacgcgggaccuggccuucgccggggccguggaguuucuggggcugcucgccagcgccggcgaccggcggcucaucguggucaacaccgugcgcgccugcgacuggcccgccgacgggcccgcggugucgcggcagcacgccuaccuggcgugcgagcugcugcccgccgugcagugcgccgugcgcuggccggcggcgcgggaccugcgccgcacggugcuggccucgggccgcguguucggcccgggggucuucgcgcgcguggaggccgcgcacgcgcgccuguaccccgacgcgccgccgcugcgccugugccgcggcggcaacgugcgcuaccgcgugcgcacgcgcuucggcccggacacgccggugcccauguccccgcgcgaguaccgccgggccgugcugccggcgcuggacggccgggcggcggccucggggaccaccgacgccauggcgcccggcgcgccggacuucugcgaggaggaggcccacucgcacgccgccugcgcgcgcuggggccugggcgcgccgcugcggcccguguacguggcgcuggggcgcgaggcggugcgcgccggcccggcccgguggcgcgggccgcggagggacuuuugcgcccgcgcccugcuggagcccgacgacgacgcccccccgcuggugcugcgcggcgacgacgacggcccgggggcccugccgccggcgccgcccgggauucgcugggccucggccacgggccgcagcggcaccgugcuggcggcggcgggggccguggaggugcugggggcggaggcgggcuuggccacgcccccgcggcgggaaguuguggacugggaaggcgccugggacgaagacgacggcggcgcguucgagggggacggggugcuguaacgggccgggacggggcggggcgcuugugagacccgaagacgcaauaaacggcaacaaccugauuaaguuuugcaguagcguuguuuauucgaggggcgggagggggcgaggggcgggagggggcgaggggcgggagggggcgaggggcgggagggggcgaggggcgggagggggcgaggggcgggagggggcgaggggcgggagggggcgaggggcgggagggggcgaggggcgggagggggcgaggggcgggagggggcgaggggcgggagggggcgaggggcgggagggggcgaggggcgggagggggcgaggggcgggagggggcgaggggcgggagggggcgaggggcgggagggggcgaggggcgggagggggcgaggggcgggagggggcgaggggcgggagggggcgaggggcggugguggugcgcgggcgcccccggaggguuuggaucucugaccugagauuggcggcacugagguagagaugcccgaacccccccgagggagcgcgggacgcgccggggagggcuggggccggggagggcuggggccggggagggcuggggccggggagggcuggggccggggagggcuggggccggggagggcuggggccggggagggcuggggcuggggagggcuggggcuggggagggggcggugguguguagcaggagcgguguguugcgccgggguacgucuggaggagcgggaggugcgcggugacguguggaugaggaacaggaguuguugcgcggugaguugucgcugugaguuguguuguugggcaggugugguggaugacgugacgugugacgugcggagugcgccgugcucuguugguuucaccuguggcagcccgggccccccgcgggcgcgcgcgcgcgcaaaaaaggcgggcggcgguccgggcggcgugcgcgcgcgcggcgggcguggggggcggggccgcgggagcggggggaggagcggggggaggagcggggggaggagcggggggaggagcggggggaggagcggggggaggagcggggggaggagcggggggaggagcggggggaggagcggggggaggagcggggggaggagcggggggaggagcggggggaggagcggggggaggagcggggggaggagcggggggaggagcggggggaggagcggggggaggagcggccagacgccgaaaacgggccccccccaaaacacaccccccgggggucgcgcgcggcccuuuaaagcgguggcggcgggc

SEQ ID NO: 2 - DNA, 154746 bp, Homo sapiens
  HSV-2 viral genome
agtccccgtcctgccgcgcgggggcgggcgcgggaaaaaagccgcgcgggggcgcccgcgggaaggcagccccgcggcgcgcggggggaggggcggcgcccgcgggggagcggccggctccgggggagggacggggaagggggcgcgcggggctgccctgccgcccgcccgccgccgccgcccgccttcgcgcccccccccaaaaaacaccccccccgggggttgactccccgggggaaaagaggcggggcgggagtccccgtcctgccgccgccccttaagagggcccgcaacacggcccgggctgcgcacgccagccgggacgggtgagttcgctaggcaagcacggactggcggttacacgtgcatgcgtgccgagtgaactctcccgccccgacgcgctccggctccgggcctacgccgagcccagccgcccgccatgtcccgccgccggggtccccgccgccggggtccccggcgccggccgcgccccggcgctccagccgtgccgcgccccggcgctccagccgtgccgcgccccggcgcgctcccaaccgcagactcccaaatggtccctgcgtacgactcgggaaccgcggtcgagagcgcgccggccgcgtcctcgctcctgcggcgctggctgctggtgccccaggcggacgacagcgacgacgcggactacgccggcaacgacgacgcagagtgggcgaacagccccccgagcgagggcggggggaaggcgccggaggccccgcacgccgcgcctgccgccgcctgccccccgccgccgccgcgcaaggagcgcgggccgcagcgcccccttccgccccacctggcgctacggctgcgcaccacgacggagtacctggcgcgcctgagcctgcgccggcggcggccccccgcgtccccgcccgcggacgcgccgcgcgggaaggtacgcctcccctccgaccccctgacgcccctccgaccccctgacgcccctccgaccccctgacgcccctccgaccccctgacgcccctccgaccccctgacgcccctccgaccccctgacgcccctccgacccccgtgtctccccgcccgcaggtgtgcttctcgccgcgcgtgcaggtgcgccatctggtggcctgggagacggccgcgcgcctggcccgacgggggtcctgggcgcgcgagcgggccgaccgcgaccggttccggcgccgcgtggcggcggccgaggcggtcatcggaccgtgcctggagcccgaggcccgagctcgggcccgagcccgagcccgggcccacgaagacggcggacccgcggaggaggaggaggcggcggcggcggcgcgcgggtcctccgccgccgcgggcccgggccgtcgggcggtctagggttgaaccggcgagggcggcctcggccggcggagccccggagctccgaaggtctgcgcgaggccgctctccgaagagacgatgggagccccgcgtatatatccgcgagggcccggcgccgccccgccgctccgcccgccccagggggcggcgccggccaaccgcgcgccgccgcgcgggcccggactccgccccggcgaccgccccgcgccggcttcccggtatggtaattagaaacttttaataggcggtcccggccgccatccccgcgcatggtaattagcaacttttaatgggccggcgttcccgctcgcggtaattagcagcttttaacgggccgccattcccgcttatggtaattaaaaacgttcggacggcccctcgctccccgcgtaattactccctcggggttccgggttatgctgattactttcttggcagaacacgcagagcctcgcgcgccgccgggtgggtgggctgatcggcccctattggtcccctgggcttcctagtatgctaatgaatttttccccgggggcgggcaccactcagggccgcgccggcggggcgccggggggactcccatctgcgtcggcggggggcggcgcatgctaatggggttcttggagtacacccggttggtccccggggacggggccgccccgagagggggggattccctccctccgcccccgccggggcgcgcggctattgggggaatcgtaaatgccgcccctttgggggagtggataggcgccgggtataaggcagccccgtgtgacggtcgggccgcattcgcaccccggcactgcgagcgacggagcggcggcccggcgggaggaggagacccggagagacagagactaaaacccggcaagagagagaccgcgggccgccgtctcgagtctaccctaccccggctcatggaaccccggcccggcacgagctcccgggcggaccccggccccgagcggccgccgcggcagacccccggcacggtgagagggcgacccccgggtctcaggcccccccttttccccggaccacccggctgcgggttgggggtggtcgcgggcggtgggctcgggggcggggacgcttgacggggccgacccccggcccgcttaagcggtcgggggacccccgtgggccgtgcgccgccccccgaccctctgggggggcgagggaggcagggaggagcccgagagcgggggacagggggggagacgaggggtcggaatccaaaggacgcagaccacctttggttacggacccctttctcccccccttccgaacaaaaagcagcgggcggggggccggggtgagggagggacacgggggacacggcgcgggggtcccgcctcacgccccgcgccctctaaatcccccccgttgctttgtcaagcagcccgccgccccgcacgcctgggggatgctcaacgacatgcagtggctcgccagcagcgactcggaggaggagaccgaggtgggaatctctgacgacgaccttcaccgcgactccacctccgaggcgggcagcacggacacggagatgttcgaggcgggcctgatggacgcggccacgcccccggcccggcccccggccgagcgccagggcagccccacgcccgccgacgcgcagggatcctgtgggggtgggcccgtgggtgaggaggaagcggaagcgggaggggggggcgacgtgtgtgccgtgtgcacggacgagatcgccccgcccctgcgctgccagagttttccctgcctgcaccccttctgcatcccgtgcatgaagacctggattccgttgcgcaacacgtgtcccctgtgcaacaccccggtggcgtacctgatagtgggcgtgaccgccagcgggtcgttcagcaccatcccgatagtgaacgacccccggacccgcgtggaggccgaggcggccgtgcgggccggcacggccgtggactttatctggacgggcaacccgcggacggccccgcgctccctgtcgctggggggacacacggtccgcgccctgtcgcccacccccccgtggcccggcacggacgacgaggacgatgacctggccgacggtgagggcgggcgggggtcgggcggggggcgggcgggggtcgggcgggggtcgggcgggggtcgggcgggggtcgggcgggggtcgggcgggggtcgggcgggggtcgggcgggggtcgggcgggggtcgggcgggggtcgggcactaaccgggggctcccgtctctgtctccctctgcagtggactacgtcccgcccgccccccgaagagcgccccggcgcgggggcggcggtgcgggggcgacccgcggaacctcccagcccgccgcgacccgaccggcgccccctggcgccccgcggagcagcagcagcggcggcgccccgttgcgggcgggggtgggatctgggtctgggggcggccctgccgtcgcggccgtcgtgccgagagtggcctctcttccccctgcggccggcggggggcgcgcgcaggcgcggcgggtgggcgaagacgccgcggcggcggagggcaggacgccccccgcgagacagccccgcgcggcccaggagccccccatagtcatcagcgactctcccccgccgtctccgcgccgccccgcgggccccgggccgctctcctttgtctcctcctcctccgcacaggtgtcctcgggccccggggggggaggtctgccacagtcgtcggggcgcgccgcgcgcccccgcgcggccgtcgccccgcgcgtccggagtccgccccgcgccgccgccgcccccgtggtgtctgcgagcgcggacgcggccgggcccgcgccgcccgccgtgccggtggacgcgcaccgcgcgccccggtcgcgcatgacccaggctcagaccgacacccaagcacagagtctgggccgggcaggcgcgaccgacgcgcgcgggtcgggagggccgggcgcggagggaggacccggggtcccccgcggcaccaacacccccggtgccgccccccacgccgcggagggggcggcggcccgcccccggaagaggcgcgggtcggactcgggccccgcggcctcgtcctccgcctcttcctccgccgccccgcgctcgcccctcgccccccagggggtgggggccaagagggcggcgccgcgccgggccccggactcggactcgggcgaccgcggccacgggccgctcgccccggcgtccgcgggcgccgcgcccccgtcggcgtctccgtcgtcccaggccgcggtcgccgccgcctcctcctcctccgcctcctcctcctccgcctcctcctcctccgcctcctcctcctccgcctcctcctcctccgcctcctcctcctccgcctcctcctcctccgcctcttcctctgcgggcggggctggtgggagcgtcgcgtccgcgtccggcgctggggagagacgagaaacctccctcggcccccgcgctgctgcgccgcgggggccgaggaagtgtgccaggaagacgcgccacgcggagggcggccccgagcccggggcccgcgacccggcgcccggcctcacgcgctacctgcccatcgcgggggtctcgagcgtcgtggccctggcgccttacgtgaacaagacggtcacgggggactgcctgcccgtcctggacatggagacgggccacataggggcctacgtggtcctcgtggaccagacggggaacgtggcggacctgctgcgggccgcggcccccgcgtggagccgccgcaccctgctccccgagcacgcgcgcaactgcgtgaggccccccgactacccgacgccccccgcgtcggagtggaacagcctctggatgaccccggtgggcaacatgctctttgaccagggcaccctggtgggcgcgctggacttccacggcctccggtcgcgccacccgtggtctcgggagcagggcgcgcccgcgccggccggcgacgcccccgcgggccacggggagtagggggagctaacactcggcttgctgcccgaaggaagccgccccccaccggaccaccggccgaggcgcctcgggggcagggggaggtggggggggggaaagacggggaggagacaggaagtgggggtgggagtgggggggggggacggacacggccccgaacagcaacacacaccagcattttgttatggactttctggccttgttgaaaacttgaggaaaaaaaaaactttatatttataaaaattttacaataaagttttgtgatgcttttgacacactttgttgttggcctttgatgcagctcccccgcgcaggggggccggggatgggggggaagggaggaggaggagggggggcgggcacgagaagccgcccccacccccgaggcctgttggtctttatcatagaacagagccggggcccggcctcgttctggctccctgtcttggtgggtgggcgggctggctggcgggtaaaaaaagagtgtgtccgtgttgacagggaggggggcccgatcgtgcagagcacgcacgtctggccggccagaccctgggggtggtgggcaggagtgggagggcgcctggctcggggagggaggagggggggggtcagccgcaccaccggcgcgaagccaggggccagggaactttgatagagaggggggaaagtggggcgggggcgagggcggttgaatcacaacgcatgcacgccctctgcccccggggacgggtgggaggaaggaggagggagaagagaagacccgaggcatgcacccgcacttacgcccgtgcccacccccgccccggcgcccaccccgcccgcacacctgcccgccacgcccgcccctcctcaccctggctgggagaaaggaggaggagcaggaagaggagacccgaggcatgcaaccgcactcaccccaccccgcccgcacacctgcccgccacgcccgcccctccttaccctggctgcggggagactcccatcggggcgagggggctcgcgcgttcgcaacaccacaccacaccacacggcccaccacaacacggcccaccacgacacaacacgacacgacgcgttttgcggggcatgcaagtcgacacaccgcgcgcgtgcctacctttccctagcggccccggcccccggcccgtttccttccgccaccactaccaccacccccccgcccgcgcccacgcggtagaggaaggggacgggcgccacacccacggctgtggccgggcacgcgcctttggggttgttgggggggggtgaccggcgcgtgggggcggtgggcgtacgggcccgacccgcgcctgcccccccgggaacgacgacgggggggggggaaacgggggtgggtggaagggaagaggaaggagaaagggggggtggatccgaacacgccggatccgcgaaaataataacaaaacaaacaaaaacagaaacaaaaacaaaaacacctagaaaaaaaggatacgggttggctcgcgggcggtgcggctgacctgcctgccctttctgggacccccgcctcgtgtttcttgaaagggggaggaagaacagttctcccccaacccctgctctcttctctcttccgcccgccccccccccctctccccgccgcctcagcagaagctcacctgtacgaccctaaacctacctgcgagaacgcgcggcgttcgaggggcgcgctctctcacacgagacacacgcaggcgccccccccccccggagcctgggtcccccggcggacggctcacgcggcgcggcgtctcggtgggacgcgggcaaagggcggcggcggcgggggggggggggggaaatgtgaggagagcgagacagagagagagaaggaagagggaaggggcgcggcgggacgggggaagacgaggagaagggaaggggcgagggtcgggcccgggagcggggcggcccgggagggagaagaaacggaacgcggaaacgccgccggcgcggcccggggccccggggcccccgcgctccgccgggggcccgggccggaccgccgggcgggggacgccttccgcccggcgccgggcggctacccgggacccccggccgggaatcgaaaaaagcctccgggggcccctttcgcgcctttcgcgaacgcgcggcgccggagggggcggccgccgaggtgcgggggcccctccggccggggcgcacctcggcggccaagccccggcccgcccgggggtccccgaggcaagaggcggaccctcggaggcgcggaagaagacgggaggcgggggaaaaaagggggaagagagggggaggtagggaggggagaggagaagggcgcgccggtgcgcggagcagccttccttctccggagtccctctcgatcggcggcgggcccctgcgttcgttgctgccgcgcccccggttttataaagacagggatgacgcagcagaaatgcccacagcaacacgcgggcggggctcgggctctccggcggcttaatggatctccgggcacggcgcccgcaaccgcagagcactcagctggcgcgcccccccccaacgtgggagtgtttaatggaagggcgtggggccggccgccggatgcccgcgggggcctaatgcggcgggaggcgtgggccgctggcgccgcggcccgtctgctggcccgcggcccgtctgctggcccgcggccacgtaaacaatgacacaggggttctctccgccgcggccggcgcggggcgttgccggcccggcccggccccggagcccgcggcgctgctcggctgcggccgcgggctccgggggctccgcactctgcccggctcgccccgtcccccctcttgctgcttttccgcgcgcctctctttcccgttgctttccctctccccccccccccctctctctctctctctctctctctccgccatcctcccgcccggccgcccactccccgctcggcctctccggctgcggtgcttgggtctccttcgtcgggcggcggggggggggcgtcgggactcgcggagggccggagaatggaaggcgaggggatgcaggaggaggatcgggactccccatcttctgcccttccatcctccgtttttccgctttccaccgccgccgccaccacccccccttccttcgcccgcccgcctcgccccggacccctcccccccgtgttccccccatcgttcaccaccacgccccccaccgcgccttggctgtttggggggtggcggcggtggtcggcgtgctgccggaggctgcgggcgcggggtaggtgggtgggcgggtggtgggggggggcccggctgcgtctcgccgcgatcccgccggtggggcgcggcggcggtcggggtggggggagagtgtcgtgggtgtgttttcgtgtcccccaccaccactcccaccccgaccgccgccgcgcccgcgtttctgccgcccgcgcgctcctgtgtggaccccggggtgggcggcgggggggggtgccgtgggtgtggcggcggggcgcgggccggggccggggctcgctggtccgccgaagtaaagaaaagatcgccaccgtgtgttcgtctgtgtgttctgcgcggcgccggggcccccctgccgggcggggcggtggggcggggtcggggtcgcggcggggaaggaaggaaagaccccggaagcgccgggagggggcgccggcgcgacgcgggcggccgggcgggggcgcgcggcggccgggcgggggcgcgcggcggccgggcgggggcgcgcggcggccgggcgggggcgcgcggcggccgggcgggggcgcgcggcggccgggcgggggcgcgcggcggccgggcgggggcgcgctttccccgcgtcgcccctcgggttcccaagacctatcacgtgtgcgcaggggaggggaggacgcgggggaggggaggacgcgggggaggggaggacgcgggggatatataaagcggtagaaagcgcgggaatgggcatattggacccgcgtgattcggttgctcgcggttgtcttgtttggacgttttttatgcgggaacaagggggcttaccggttacactgtccgctcgctatggggttcgtctgtctgtttgggcttgtcgttatgggagcctggggggcgtggggtgggtcacaggcaaccgaatatgttcttcgtagtgttattgccaaagaggtgggggacatactaagagtgccttgcatgcggacccccgcggacgatgtttcttggcgctacgaggccccgtccgttattgactatgcccgcatagacggaatatttcttcgctatcactgcccggggttggacacgtttttgtgggataggcacgcccagagggcgtatctggttaacccctttctctttgcggcgggatttttggaggacttgagtcactctgtgtttccggccgacacccaggaaacaacgacgcgccgggccctttataaagagatacgcgatgcgttgggcagtcgaaaacaggccgtcagccacgcacccgtcagggccgggtgtgtaaactttgactactcacgcactcgccgctgcgtcgggcgacgcgatttacggcctgccaacaccacgtcaacgtgggaaccgcctgtgtcgtcggacgatgaagcgagctcgcagtcgaagcccctcgccacccagccgcccgtcctcgccctttcgaacgcccccccacggcgggtctccccgacgcgaggtcggcgccggcatactcgcctccgacgcaactagccacgtctgcatcgcaagccaccctgggtcgggagcaggacagccgacccgtctagcggccgggtcggctgtccagcgtcgtcgccctagaggctgtccgccgggcgtgatgttttccgcatctacgacccccgaacagcccctggggctgtcgggcgatgcgacgccgcccctgccgacttccgtgcccctggactgggccgcgtttcggcgcgcgtttctgatcgacgacgcctggcggcccctgttggagccggagctcgcgaaccccctaaccgcgcgcctcctcgcggagtatgaccgtcggtgccagaccgaagaggtgctgccgccgcgggaggatgtgttctcctggacgcggtattgtacccccgacgacgtgcgcgtggttatcatcgggcaggacccgtaccaccatcccggccaggcgcacggcctggcgtttagcgtgcgtgcggatgtgccggtgcctccgagtctacggaacgtgctggcggcggttaaaaattgttaccccgacgcgcgcatgagcggccgcggctgcctggaaaagtgggctcgcgacggcgtgctgttgttgaacacgaccctgaccgtcaagcgcggggcggcggcgtcccactccaagcttggatgggaccgttttgtgggcggggtggtccaacggctggccgcgcgccgcccgggcctggtctttatgctctggggcgcccatgcccagaacgcgatcaggcccgaccctcgccaacactacgtcctcaagttttctcacccgtcgcccctctccaaggtcccgtttgggacgtgccagcatttcctcgccgcgaatcgctacctcgaaacccgggacattatgccgatcgactggtcggtataagatgccgacatccggggtcttgatttacgagggggcaattaataaagactgttgatggttaaatctcgggtctcataccggtccgtgatgtcgggcgtgggggaagagagggtcccctctgcgtttactatccttgcctcgtggggctggacgtttgcaccccagaaccatgatcctggcgcgtcgccgaatacgacgcccatagagtcgattgcggggaccgcaccggacgcgcacgtggggcctctcgacggagagccggaccgggatgcgatctccccgcttacgtcgagcgtggccggcgacccgccgggggcggacggcccctacgtcacctttgatactctgtttatggtatcttcgatcgacgaactggggcgccgccagctcacggatacgatccgtaaggacctgcggctgtcgctggccaagttcagcatcgcgtgtaccaagacctcgtcgttttcggggacggccgcgcgccagcgcaagcgcggagcaccgccgcaacgcacatgcgtaccacgcagcaacaagagcctccagatgttcgttttgtgcaagcgcgccaacgccgcgcaggtgcgcgagcagctgcgggcggttattcggtcgcgcaagccgcgcaagtattacacgcggtcctcggatgggcggctctgcccggccgtccccgtgtttgtacacgagtttgtttcgtccgaacccatgcgcctccatcgagataacgtcatgctgtctacggaaccagactaagcacccccgccgtcccctttcttttccccctacccttcccccgttactgatgtgttgtacgtttcaataaataacacgtagcttattttgttggatgatggattgattgattttattgaccgttcgttcgcccggcggtgccgtcgccgcgcgcagagggaatatgcaagcgggcggggtggggaggaaagaaggtttcaggttccgggggttgggtctgcgtcgtccagggtggggctgatctgaatttcccgcagaacctcgaccagtaggtctgttgtgtttgctgggaactcgcccgccgttggggatacgggggcggggggtgtggtcgggcggacgtccaggggtgcgttatcgcacccccgcgccgcctcgggggccgtcccgtagatcgttgcggtgatgtagatggtgtccggggtccacaccaccgtcaggatgccggccgtcgcactccggacgctttcgccgtgcgatgagctgacccaggagtcaaaggggtacgcgtacatatgggcgtcccaccagcgctccagcctctgggtactagcgcgtcctataaagcggtatgcgcaaaattcggcacgacagtcgataatcaccagcagcccgatgggggtgtgttgtatcaccacgcctccgcggggcaggcggtcctggcgcgctcgaccccgcgtcagaaccgcgcgcgtccctgactcaaacacgtgcaccacctgtgccgcgtccggcagcgcgctcgttagcgacgccctggggtgatgtaggctgtacgcgatggtcgtctgggggttccccatgtctcgggggggtgggggtgaatgtcacccggcccgggtgcggtgggaacgcgagggaatggagggttaatagacaatgaccacattcggatcgcgtagagcagatagtatgtgctcgctaatgacgtcatcgcgttcgtggcgctcccggagcgggtttagattcatgtgcaggaactcggatgaggtggtgcgggacatggctacgtacgcgctgtttaggcgcaggtttccgggcgtgaagcatatggcgaccttgtccagactgagcccctgggagcgcgtgatggtcatcgcgagtttggagctgatgccgtagtcggcgttgatggccatggccagctccgtggagtcgatcgactcgacaaactcactgatgttggtattgacgacagacatgaagccgtgctggtcccgcaggacgatgtagggcaggggggactcctccaagaactcggccacgccggccgtcgcgtgccgccgccgcagctcctccgcgaacgcgaacacccgggtgtacgtgtaccccatcagcgtgtagttgtccgtctgcagggccacggacatcagccccccgcgcggcgagccggtcagcagctcgcagccccggaaaatgacattgtccacgtaggtgctgaagggggcgctctcaaacacctccccgaagagctcccgtaggataaggtatcgccccagaaaggccctcttcaggagcccaaactgggcgtggacggccgcggtggtctcaggctcttcgagggcgtagtggcagtagaacacgtccagctgctgttcgtccagcccggcgaagataacgtcaaggtcgtcgtcggggaagtcgtccgggcccccgtcccgcgggcccaggtgcttaaaattgaacgcacgctcccccggagagcggtcgctggtgtcggcggccctggttgccgatgcgccggcggcgtcccggcgtagcgacaggagttctgccgtcagctcccctaggcggccgtaggccagggtcctctgggtcgcgtccaggccggggcgctggagaaagttgtaaaagtgaatcagcccgccgaacatgagccgcgacaggaaccggtaggcgaactccaccgaggtctccccctgggtcttcacgaagctgtcgtcgcgcagcacagcctcgaaggtccgaaacgtcccgtcgaacccaaacaccatctttcggaggcgcgcggtcaccgcgacctggctgttgaggacgtacgtgatgtcgttccgggccacgactagctgttgcttgctgtgcacctcacagcgcacgtgccccgcgtcctggtcctgactctgggagtagttggtgatgcgactggcgttggccgtgatccacttttccatggtcagcgtgggttgctgcgtgagccgtcgatactcgtcaaactctttgaccgacacaaacgtgagcacggggagggtaaacacaacaaactccccctcgcgagtcacctttaggtaggcgtggagcttggccatgtacgcgctgacctccttgtgggacgagaacagccgcgtccaccccggaaggttggccgggttggtgatgtaactttccgggacgacaaagcggtccacaaactgcatgtgctcctcggtgatgggaaggccgtactccagcaccttcatgaggttcccgaactcgtgctccacacatcgcttgttgttaatgaaaatggcccagctgtgcgagaggcgcgtgtactcgcgtagggtgcggttgcagatgaggtacgtgagcacgttttcgctctgccggacggagcatcgcagtttttggtgttcgaaggtggactccagcgaggccgtctgggtcggcgaccccacgcacaccagcaccggccgcaggcggcccgcgtactggggggtgtggtacagggcgttaatcatccaccagcaatacaccacggtcgtgagtaggtgccgccccaggagcccggcctcgtcgatgacgataatgttgctgcgggtgaaagccggcagcgccccgtgtgtgaccgaggccaggcgcgtgagggcaccctggcccagccccaaagtctgctctagggcggtgagggcgtggaactcgtttcgcgcgtcttcgcccccgtgcgccgccagggcccgcttggtgatgtcgaggatcacctcccagtagtacgtcaggtctcgccgctgcaggtcttccagcgaggcggggctgctggccagggtgtacgggtgctgccccagctgggcctggacgtgattcccgcgaaacccgaactcgtgaaagatggtgttgatgggtcgactcagaaacgcccccgagagcttaacgtacatgttctgcgccgcgattcgcgtggcgcccgtgaccacgcagtccaggacctcgttgagggtctgcacgcacgtactctttccggatccggcgttgccggtgatgagatacgccgcgaacggaaactcccggagcggcaggccggtcgggacctccaaggccgccacgtcccggaaccactgcaggcgcggcacctgcgtgacgtcgagctgctgctgcgagagctctcggatgcgtgcgatgattggttggaccccgtgcatggacgtaaaatttaaaaacgcctcgtccctgaaccgcacggcgggtctggccccgggctgctgtgggggcggacctggtgcccggacgtcccgcgagccctccccgccggacgccgccatggccgcacagcgcgcgcgggcgccggcgatgcggacgcggggcggcgacgcggcgctatgcgcccccgaggacggctgggtgaaggttcaccccacccccgggacgatgttgttccgcgagattctcctcgggcagatggggtacaccgagggtcagggggtgtacaacgtcgtccggtccagcgaggccgccacccgacagctgcaggcggcgatcttccacgcgctcctcaacgccacgacgtaccgggacctggaggaggactggcgccgccacgtggtggcccgcggcctccagccgcagcggctggttcgcaggtaccggaacgcccgggagggcgatatcgccggggtggccgagcgggtgttcgacacgtggcgatgcacgctcaggacgacgctgctggactttgcccacggggtggtagactgctttgcgccgggcggcccaagcggaccgaccagcttccccaaatatatcgactggctgacgtgtctggggctggttcccatattgcgcaagacgcgcgagggggaggcgacgcagcgcctgggggcgtttctcaggcagcacacgctgccccggcagctggccacggtcgccggggccgcggagcgcgccggcccggggcttctggatctggccgtcgcgttcgactccacgcgcatggcggaatacgaccgcgtgcacatctactacaaccatcgccggggggagtggctggtgcgcgacccggtcagcgggcagcgcggcgagtgcctggtgctgtgcccccccctgtggaccggcgaccgcctggtcttcgattcgcccgttcagcggctgtgccccgagatcgtcgcgtgccacgccctccgggaacacgcgcacatctgccgtctgcgcaacaccgcgtccgtcaaggtgctgttggggcgcaagagcgacagcgagcgcggggtggctggcgccgcgcgggtcgtcaataaggcgctgggggaggatgacgagacgaaggccggctcggccgcctcgcgtctcgtgcggctcatcatcaacatgaagggcatgcgccacgtgggcgacatcaacgacacggtacgcgcctacttggacgaggcgggggggcacctgatcgacacccccgccgtcgaccacaccctccctgggttcggcaagggcggcaccggccgcgggtcgcgcccccaggacccgggggcgcgaccgcagcagcttcgccaggcgtttcagacggccgtggtcaacaacatcaacggcatgctggagggctatatcaataatctctttggaaccatagaacgcctgcgagagacgaacgcgggtctggcgacccagctgcaggcgcgcgaccgcgagctgcggcgcgcccaggcgggggcgctggagcgggagcagcgcgcggcggaccgggcggccgggggaggcgcgggccgcccggcggaggcggatcttctccgggccgactacgacattatcgacgtcagcaagtccatggacgacgacacgtacgtggccaacagtttccagcaccagtacatccccgcgtacggccaggacctcgagcgcctgtcgcgcctctgggagcacgagctggtgcgctgcttcaagattctgcgccaccgcaacaagcagggccaggaaacgtcgatctcgtactctagcggggcgatcgcctccttcgtggccccgtatttcgagtacgtgcttcgcgccccccgagcgggcgcgctcatcaccggctccgatgtcatcctaggggaggaggagttatgggaggcggtctttaagaaaacccgcctgcagacgtacctgacagacgtcgcggccctgttcgtggcggacgtacagcacgcggctctgccccggcccccctccccaacccccgccgatttccgggcgagcgcgtccccgcggggcgggtcccggtcccggacccggacccgatcccggtcgcccgggagaacgccgaggggtgcgccggaccagggctggggcgtcgaacgcagggatggccgaccccacgcccgccgatgagggaacggccgccgccatcctcaaacaggccatcgccggggaccgcagtctggtcgaggtggcggaggggatcagcaaccaggcgctgctgcgcatggcctgcgaggtgcgccaggtcagcgatcgccagccgcggtttaccgcgaccagcgtcctgcgcgttgacgtcacccccagggggcggttgcggttcgttctggacgggagttccgacgacgcgtacgtggcgtcggaggattactttaagcgctgcggggaccagccgacgtatcgcggttttgcggtcgtcgtcctcacggccaacgaggaccacgtgcacagcctggccgtgccccccctcgttctgctgcaccggctctccttgtttcgccccacggacctccgggacttcgagctcgtctgcctgctgatgtacctggagaactgtccccggagccacgccacgccctcgctgttcgtcaaggtgtcggcgtggttgggggtcgtggcccgccacgcgtctcccttcgagcgcgtccgctgccttctcctccgcagctgccactggatcctgaacacgctaatgtgcatggcgggcgtgaagcccttcgacgacgagctagtcctgccccactggtacatggcccactacctgctggccaacaatccgccccccgtcctctcggccctgttttgcgccaccccgcagagctctgcgttgcagttgcccgggcccgtcccccgcacggactgtgtggcctataacccggccggcgtcatgggaagctgctggaattccaaggacctgcgttcggctctggtgtattggtggctttcggggagccccaaacgacggacctcgtcgcttttctatcggttttgctaactccggaaaataaacgtgttttttatggaacgttccccacctgtcgtgtcatctctcgggggatggtggtgggcctgtgtgtgtgtcttgtgcaccgaaggaggaaagtgggggggtggtggtgctggtggtggaaagacatgatagagggaacaaagaaatagaagaaaaccacaaccggcgcgtgccagtaaatacggacgcgcgcacacgcggggggtaagttggagcacggggccccggtttattgaccaaattcagggaaacagaaaccgaatcttttcatcgaaagggtacacaaagctcccgccctcgccccacacgccttccagaacccccgtaaacaccagttgaatctcgcgcaggatctcgcgcaggtgatgggcgcagtccacgggggggagcaccaagggccgcgggtacagatccacggggacgccgaccgactccccgcccccgggacatacgcgcacgacgcgtctccagtattgctccgcgtccagcagggcgcctccgcggaaggccgtttggggcagggggtcgtcggcctcgcctgggggggtcagaacgctccagtactccgcgtccagacgcctcccgaaggcatccaggacaaagcggtcacaggcgtcctccatgacgccccgggccgcgcacacggcctcctccggcgggccggcggccggccgccggaggattcgtctcagcgcgtcgcgcataacctcggccgccgcggcgtacgcggccccgcggagaggaaatccctgcaggaagtcggtgtcatcgcgggagttccagaaccacgccccggtctggctccaggtgacgacgtgggtgtagacgccctctggcgccagggagggggcgaggcgcgggcgtatgccgttggccgaaagtacggcgcgcacggacgcctcgagggcccggcgggcgtcctggatcgcgccgtgcgcggcgtccgcgtccccggggtccacgttgaacagcccccagaacgcagccccggtgccgccgcagaccgcaaacttcaccgagctggccgtctgctcgatctgcaggcagacggcggccatgaccccgccgagcagctgccggagcgcggggcaggcgtcgcacgcgtccggcaccaggcgctccagcacggcccgggcccagggctccgagggggcggccgccaccagcgcgtccagcctttccaggcccgcccgcccccgggcttccggcagcccggcctccccgaggcccgcgagggcggccaggagctgggcctggagcccggagaaacaaaaccgcgccgtccagaccggcccgacggccgccggggggtcgagtagttggatggtggtggccgtggggtgccaccgcgcgaccgcttcccgaaaggcgggcaggaggcggccggccgcctccgaggccacggccggccatgcccgcgggggcaggacgaccctggcgcccaccgcgggccaggcccccaggcacgcggcatgggtggccgcggcgccccgcaccaggtcacgcgccgactcggcggcggcggcggccggcacggtaaacgtgggccagcccggaaatcccagcacggcaaagtattggacgggccctccccggacctcaaacccgggccccagaaaagcgaagacgggggccagggctccgggggcggcgtggaccgtggtatgccactgccggaagagggcgaccagcgccggggcggagaacccgtcgccggcgctcacgaagtagtcgtagccgcgcggcagcagcacccgcgccgtgacccgctgcgggtgtccgcggggccgcaggccgacctcgcacacctcgaccaggtccgcgaaggcgccctccttcctggtcggcggaaacgccagggtggtgtattcgcgcgcaaaacgcgcggtcctcgtcgtgatggtgacggcgagcgaggcggaggacgcgcactgggggctgtcgcgaatggcggccaggcgcgcccacgccaaccgcgcgccggggtgctcggcgacgcgcgcggacagggccagcgggtcgacgtcgaccttggcctccacgtccaggagggcggcgcgaggagcggccggcgggccccacgacgccctttcgaccctcacgaccagacccgtctgcgggtcccagcccaggcgcagcgggacgaagagggcccaccggcccgtctggcgctccagggccgccagaacgcacgcatacagcgcccgccacagggtcgggtcccccaggggctccagcggggaggcggccggggccgtcgcggcgcgggcggccgcgacggccccgggggccgagacgtcgggggagccgtagaagtcctgcaggtcggacgaaccaacggacacctccgcgaagcgcgcgcgcgcctcccccgcggcgtcgcgacagaccagatacagcagggcgtggaggcagtcgcgcgtgcgcgggggcagccataccgcgtatagggtaatggcgctgacgctctcctccacccaaacgatgccgggggcttccatgccacgacgcccgggggttgccgtgtatcgaacgagcgcggccccagacttatagggtgctaaagttcaccgccccctgcatcatgggccaggcctcggtgggaagctccgacagagccgcctcgagaatgatgtcagtgttgggctgggcgccggaggcgtgcgtgcgcaagcagcgcccccacgcgggcgcgcgcagcttgaagcgcgcgcccgcaaactcccgcttatgggccatcagcagcgcgtacagctgtctgtgcgtccggcaggcgctgtggtcgatgcggtgggcgtccagcagctccacgatggctcgcttggtgaggtttttaacgcgccccgccccgggaaacgtctgcgtgctcttggccagctgcaccccgaacagttcgccccagatgatcttgaacagcgacagcgcgtgctccgtctcgctcacggacccgcgcggggggcagccgctcagggcgtcggccacgcgcttaaccgcgtcctccgacagcaaggggccgtcggtcacgttacagtggcccagttcgaacaccagctgcatgtagcggtcgtagtgggggttcagcagctccagcacgtcctcggggctaaaggttcgccccgaccccccggccatcgagtcccactgcaggcacgcggccatggtgctgcacagacggaacagctcccagacgggggcgacgtttagggtggggtgtagggccacaagctccagctctccggcggcgttgatcgtggggatgacgcccgtggcgtagtggtcgtaaagccgccggaagatggcgctgctatgggcggccatggggacgcgaagacaggcctccagcagcaccaggtagatgaaccgcgtgcggccgaccaggctgttgaggccgcgcatgagcgcgaccacctcggccggcgcgacgtccggccggaggtacttttcgacgaaaaggcccacctcctccgtctcggcggcctgggccgacagggacgtgtcggggtcctggcagcgcagctcccgcagatcccgctgggccctcagggcatcaaaatgtatcccccgcaaaaacagacaaaagttcctcggggtcagcgcggcgtcgtggccccagaaccgcacgtgcatgcagttgagggtcagaagcatgtggaggatgttaagactgtccgcgaggcacgccagcgtgcacctctcgaagtagtgcttgtaccggaatttgctgtagatgcgcgacccccgcgcctgcgccgcgtcggcgtgcgacgcgtcgcagcgccctttgaaccggcggcacaacaggttcgtcacctgggaaaactgtgccggccactgcccgctggcgctcaccacgtggttgagcagcatgggcgtaaagacgggctccgagcgcgccccggacccgtccatgtagatcagcagctcccccttgcggagagtccgtacccgccccagcgactggtacacggacaccatgtccggcccgtagttcatgggtttcacgtaggcgaacatgctgtcaaagtgcggcggatcgaagctaaggcccaccgtcacgaccgttgtgtagatgaccacccggtaccggccccatgtggtcacgtcgccgggcggggtgagcgagtggagcagcagcacgcggtccgtaaactgccggcagaacctggcaacgacctccgcgaaggagaccgtcgacgagaagatgcagacgttatctccgccggccaggcgcgcctccagctccccgaagaaggtggcgtccgggggggcgtccggggggggcgccccgcccgccggcccccggcggcgcagggccgcctgcaggacctcgggccccaggcgcgggagaaacagacaacggcgcgccgaaaatccgggcatggcgtactccccgatgaccacgtgaacgttcttttcgccccggaggctgcacagaaagtccaccagctgcgcgttggcggtggcgtccatggcgatgatccgcgggcacgtgcgcagcaggcgcagcatcaacgcgtcgacgcggcccagctgctgcatcgtcggcgagtacagttggcccaacgtcgacatgacttcgtccaggacgagcacgtcgtagttgttcaacaggttcgggcccacgcgatgaagactttccacctgcacgatgagacggtggaaggggcggtcgttcatgatgtaattggtggatgagaagtaggtgacgaagtcgggcaaccctgactcagcgaaccgcgtcgccagggtctgagtaaaactccgacgacaggagacgaccagcacactcgtgtccggagagtggatcgcttcccccaaccagcggatcagcgcggtagtttttcccgagcccattggcgcgcggaccacagttacgcaccgggccgtcggggcgctcgcgtccgggaaggtgacgggtccgtgttgctgccgctcgatcgttgttttcgggtggacccggggaacccactcggccaaatcccccccgtaaagcatccgcgccagcgatacactcgacgtgtactgctcgcactcgtcatccccgatgggacgccgggcccccaggggatcccccgaggccgcgccgggcgccgacgtcgcgcccggggcgcgggcggcgtggtgggtctggtgtgtgcaggtggcgacgttcatcgtctcggccatctgcgtcgtggggctcctggtgctggcctctgtgttccgggacaggtttccctgcctttacgcccccgcgacctcttatgcgaaggcgaacgccacggtcgaggtgcgcgggggtgtagccgtccccctccggttggacacgcagagcctgctggccacgtacgcaattacgtctacgctgttgctggcggcggccgtgtacgccgcggtgggcgcggtgacctcgcgctacgagcgcgcgctggatgcggcccgtcgcctggcggcggcccgtatggcgatgccacacgccacgctaatcgccggaaacgtctgcgcgtggctgttgcagatcacagtcctgctgctggcccaccgcatcagccagctggcccaccttatctacgtcctgcactttgcgtgcctcgtgtatctcgcggcccatttttgcaccaggggggtcctgagcgggacgtacctgcgtcaggttcacggcctgattgacccggcgccgacgcaccatcgtatcgtcggtccggtgcgggcagtaatgacaaacgccttattactgggcaccctcctgtgcacggccgccgccgcggtctcgttgaacacgatcgccgccctgaacttcaacttttccgccccgagcatgctcatctgcctgacgacgctgttcgccctgcttgtcgtgtcgctgttgttggtggtcgagggggtgctgtgtcactacgtgcgcgtgttggtgggcccccacctcggggccatcgccgccaccggcatcgtcggcctggcctgcgagcactaccacaccggtggttactacgtggtggagcagcagtggccgggggcccagacgggagtccgcgtcgccctggcgctcgtcgccgcctttgccctcgccatggccgtgcttcggtgcacgcgcgcctacctgtatcaccggcgacaccacactaaatttttcgtgcgcatgcgcgacacccggcaccgcgcccattcggcgcttcgacgcgtacgcagctccatgcgcggttctaggcgtggcgggccgcccggagacccgggctacgcggaaaccccctacgcgagcgtgtcccaccacgccgagatcgaccggtatggggattccgacggggacccgatctacgacgaagtggcccccgaccacgaggccgagctctacgcccgagtgcaacgccccgggcctgtgcccgacgccgagcccatttacgacaccgtggaggggtatgcgccaaggtccgcgggggagccggtgtacagcaccgttcggcgatggtagccgtttcgttcgttttaataaaccgacgttgtgcgtttcaccatacttcggcgcgcgtgtgtgtgtgtttttttttttgtggtgtttattttccccccaccccttccttttctttcggccaccacccccctcctcccccgtactatacaacaaaaaataccacacatacgaccaaatacggacaatcatttctgtctttattcgctatcagagagtgggggcgtgagcgtggcaggagggcgggccacgtcggggtcccgccgtctggtgtgacgcgatggggggtccgatgcgcgccggtactggggccccggcgcccgggtgaccacgcgcacgtcggggggcacgtagaagttaccctcttcttcggactcgatgtccacgacgtcaaattcgtgggcggtcagcgagacgacctccccgccgtcggtggtgatgacgttgtgtcggcagcagcagggccgcgccccggagaacgcgaggcccataacttggcgagcgtatcgtcgaaggccaggcggctgtttcgccggatgtcccggtagatccccggctcgacgcggacgggggtgatgatcagggcgatcggaacggcctggtccgggaggatcgatgccttggcgggtccgggggccccgccaggcccggcgggcgctccgcggccgtcctccaggcggaacgtcacgccctcctccgcgcccgcgcggtgcctgccgaggaacgtcaccaggtgcggttgcagggggcagtcgggaaagtggctgtcgaggacgtatccctgcaccaagatctgtttgaagttcgggtggcgggggttggcgaagatgggctcgcggcgaaccagctccccggagctccaggccacgggagagatggtgcgacgctcaaggtcggggacgccaaacagaagcacctccgagacaacgccgctatttaactccaccagcgcccgatccggggcggagcatcgccttttttcgccggcggcgcgggaatcgagccagtcccggtcttgggtgacgagcgcctcctccgggcccggaacgcgcccgggcgcgaagtagcgcacgccggggttggggatggaccggatgaacgcccggaacgcctccggcgatcgccgcgccatcaggtcctcgtacgcggaggccgcgggggcgccggggtccgcggggtcgaacgcgtacttggctcggcacttaacctcgtagaaggccaggggggtctggggggcgggggccaggtagccgtgagggtccctggggcacacgaggatgtccagggacgcccccaccatgcccgtgtggccgtccatgaggaccccgcacgcgtgcacgttctcctcggcgaggtccccgggttggtgaaagacgaagcgcccggcgtcggcgtcgtcgttgacgcccgcgtccgcgcggcccacgcagtagcgaaacagcaggtttcgggccgtcggctcgttcacccgcccgaacatcaccgccgacgactgggcgtccagccgcaggctggcgttgtgggtgagccactgggacgagaagcacggaccctgcgcgccccaccgcagcgtggaggcggtcgtcaggccccgccgaagcagggcccagagctggcagtcggcctggttttgcgtcgccgcctcgtaaaatcccataagcgggcggggggcgacggcttcggcggcggacgggggggcgcggcgcgtcaggcgccagaggtgccggccgagcccgcggtccaccatgccggccgcctccagcgacacgacgagggagcacagatagtccaggcgagcccacaggggcccgatggccagaggggagcggacgccgcgcagcaggccgcgcaggtggcgctcgaacgtttccgccaagatatgggggggcagtgcgttggggatcgccgacgccgaccacatcgggtcggggtccgggggaccggggctgcagtccgggtcgatggcgtgtgcgccccccggcgagaggggaatgtcgggggttggcgggccggatgaggcctcagagagggccggggacgcgggccgggccttttcgcccggggccccgccgtcgggttgcccacgtggggggctctggggccaatgggaacccggggcccccggtgacgtggggcggggtggggcggggcggggcccaaagacggtcgccagatctaggctgttgggtcggggccgcttcgggggactatcggggtcgcgggcggggtccgcggggcgcttggcgccgggtgttgcggcggccgccatttttacgagcagccgaagagctcgagggcggaagggatcctcacgacagagagtggcgcgcggccgggttggcgtgacagaggcgggagaccagcaccagcagcggcctcagctcgggcggcagcgacaccgacgacaggacggccttgtgcgtgcgctggtaatttatacactgctccgtgaacgcgcgccgaatcttgggattgcgaaggtggcgccggatgccctccggcacgtcatacgccaggccgtgggtgttggtctcggccgagttgacaaagagggcggggtgcagaacgcagcgataggcgaggagggccacggcaaagtccggcgagagctggttgttaaagtactggtagcccgggacgcgggtcacggggacgcccaggctcggggccacgtacacgctaaccagcagctccagcagcgtctgccccagggcgtagagatcgaccgccagcccgacgtcgtgcttcagggggcggttgttaaactcggcccgctcgttgttgaggtactttaccgagagctccggtggctggttgtacccgtgccccaccagagtgtgaaagttggccgtggtcagggcggcgggcatcccaaacccccggggggactcgaggtccggctcctggaggcaaaactggccccgggatatcgtggagttggagttcagggtcaccaggctaaagtcggccaggacggccggccggagcgacaccgcgtccgatcgcagcatcacgaggacgttggcgcacttgatgtccaggtggctgatcccgcacctggtgttcaggaacaccacggcgcgcgccaggtctgtgaagcagtggtggagggccgtcgcgacggagggggtggtcgcgcgcagggacgccagctggccgatgtacttgccgaggtccatgtcgtacgcggggaacacgatctggcgctgctgcagcgagaacccgagcggggtgataaagccgcggatgtcgtgggtgcggccgccgcgaagagcgcactcccccacgagcagggtcgcgacgagctccacggcaaaccactctttttcccggatggtcttcacggcgagcttgtgttcgcgaatcaactgcacctcgccgtacccccccgagcccccgaagctgcgggccccggggatctccagggtcgtgtagcggagggcggggttgacggcgaatacggggatgcatagcttgtggatgcgcgcgagggacaggatgtgcgaggggggcgacgggggcgaggtcatggccgtctcggacctgcgcaggggcgggcgccttagcttggccgcagggccgggggcctcgggggacgagcggcgacgagacgagcggctcactcgccatcgggacagtcccgcgcgaagccgctcccggaagctggatcggcggcgggacccggggcgggctccggagacggcgccgtctcggggggaggggccgcttgggcgtccggacgcccggcggctgagggagtgtatgtaggacgcgagccaggccttgaaggagcgtcggtgtgcaccttgggggctgatgtcagctgccacatgactagcaggtcgctgtcgcccggactcatccatccgtccgccaggtcgccgtccccccacagagacgcgttcgccgcggcctcttcgagctgctcctcctggtccgcaagacgatcgtccgccgcgtccaggcgctcgctaagcgcgggatcgaggtaccgtcggtgtgcggttagaaaatcacgtcgcgccgcttgctcttccacgcgaattttaacacaggtcgctcgctgtcgcatcatctctaagcgcgcgcgggactttagccgcgcctccaattccaagtgggccgccttggcggccataaaggcgccaacaaacctaggatcttgtgtactcacgccctcccggtgtagctgcagggtctggtccctgtacacctcggcccggaggtgcgtctcggccaaacgtcggcgcagggccgcgtggctggcgtctcggctcatctcgccgcccccgcgcgcgcccgacgtcggactccttcgccccgacccccctgacctcagccgcccccgcctcgcccgcgatgtttggccagcagctggcgtccgacgtgcagcagtacctggagcgcctggagaaacagaggcaacagaaggtgggcgtcgacgaggcgtcggcgggcctgacgctcggcggcgatgcgctgcgcgtcccttttttggattttgccaccgcgacgcccaagcgccaccagaccgtggtcccgggcgtcgggacgctccacgactgctgcgagcactcgccgctcttctcggccgtcgcgcggcggttgctgtttaatagcctggtgccggcgcaactcagggggcgtgactttgggggcgaccacacggccaagctggagttcctggcccccgagctggtgcgggcggtggcgcgcctgcggtttcgggagtgcgcgccggaggacgccgtgccccaacgcaacgcctactacagcgtcctgaacacgtttcaggccctgcaccgctccgaagcctttcggcagttggttcacttcgtgcgggacttcgcccagttgttgaaaacctcgttccgggcctctagtctcgcggagactacgggccccccgaagaaacgggccaaggtggacgtggccacccacgggcagacgtacggcaccttggagctcttccagaaaatgatactaatgcacgcgacctactttctggccgccgtgctgctcggggaccacgcggagcaggtcaacacgttcctgcggctcgtgttcgagatccccctgtttagcgacacggccgtgcggcacttccgccagcgcgccaccgtgtttctagtccccaggcgccacggaaagacctggtttttggtgcccctcatcgcgctgtcgctcgcgtccttccgggggatcaagataggctacacggcccacatccgcaaggcgaccgagcccgtgtttgatgagatcgacgcctgcctgcggggctggtttggctcgtcccgggtggaccacgtcaagggggaaaccatctcgttctcgttcccggacggctcgcgcagcacgatcgtgtttgcctccagccacaacacgaacgtaagtacgccttcctcccgcggtgcctgtttccccggtgccgccctccccgagatcgaccgacagacaaacacagccagacgcgagtgtgggacgacacgcccgcagccccccccccgccatggcgggggggaagccttactgtttatttgtaatcggacgatgaggctctggccacggcccgcgcgaccgcggggcagctcgttgcaaacaggcggctggtatacgatgacagaacgcagaggcgccacccggcgctggtcgggcggatgacgctttccgcgccgtcccggcccacgacgacctcgtgcaggtgggccgtgatgcgcgggcggcgggtcgcctgccgcaggataaccgcgtccacggggtgcccgaagaggagctgacacaggctcgcgtccccccggacggccagggtgcgctgggccatattggaccacatgcacggggcgacgcagggacaggcctccgccacggcgggggcgcgccacagcgcgttggcggaatcgatgtgggccgtcggggcgcaggcgccgcctcctcccggggggtcggtaatcctggatagcagccatcctaaatggcgggcccggctgcccgggggacagagcgaccccaggtcatcatccatggcccagcagtatatgcggccgccggggaggtgccaccaggcccccggacccagggcacagcacgccccggattcgggggccgtgtccgtgggtaccaggtaggcgccgtcgagctcgtgggccacgggctcgtccgcgagctgttcggcggcggggtcgggggtttcctccgggggggaggcagcttccaggtggccgaaggctagggtgcacagcagcggggtccgggggtgcgttacgctgcggaggtggacggtggcgcagtagcggcgctcgcggttaaagaagaaaatggcaaagaacgtgttcgaaggcaggcgcagcgccttgggccgcgtcaggtacaggaagatctcgcagaaaagggcacgctcggggtcggggtccggaagggccacctggcacagcggctcggtgaggaccgtgaggcaccgaaaaatcttaagccgctcgtccccccgaacgacgcgccacacgaagacagagttggcgatgcgcgcgacgaggtcggcttcgggccccgggtcgggggcgcgcgcgtcggggggggcgccccggtgacccggcggggccgcggctcccggggggcctggcgtcgcctggggacgccagagtgcccgctgtgccaggttggtggtggggaagggaccggagacgcaccaaaagcagaggggccagcgcgtgtatgagttggggggggggtgggtgagcggtggaacaaaagcacgcgtcagcggacaaggccgggtcccgtagccgccccgcgacagaaccggagtccgacggcacgcgcgacggggtctgcgaggctgaggtacgccgcggtgttaatggtaaacgcaaagcctcccggaaagaccactagcccgcagaggcggcgattgaacccaaggcagaggtacgcgtagctctctcccggaaggtattgctcgcagaccctgtgtggggcagtggaggggctgccctccatgaagcgacatttactctgctcgcgtccattgacgtcaccgtcaatcaccactgcgattggacggttggtgaggcgcagcgtgtctccgctggtgctgtagtagtcaaacgcgtagtgggcgtcggagtcggcgaagcgggcggggatgtcgtcgctgagagggacgagccgccgccgccgcccccgaccgccctggccgcccagatgcgccagcacggccagggcgtacgcggtgtgaaagaacgcgtcgggggcggtcccctcgagggcgcgcatcaggttctccaggagcacggggaagcgccgcgtcacctcccctagccactcgctctggtgggggccaaagtcgtagcgcaggcgctggaagatgcgcgggccgccttggagcgcggcccggatagagtggcccagggcccgcagacacgcgatctggatgcgcgcgacgaaggccacctcggccgcgatgtcaaagggctgcagcacggggcgcgggtggcgcaggggtccctcgagcgcgggaaagcgacgcagcagcgccgtctgggccgcgggggacagctggtgggggcgcacgacgcgctcggcggcacaggcctccgtcagggccgtggccagctcggaggacagccgcggggggcgggcgcgtcgcccgccccacgccaccgaattctcgtaggagacgacgacgaagcgctgcttggtcccgtagtgatggcgcaggaccacggagatggagcgacggctccacagccagtcgggccggtcgccgccggccagagcttcccacccgcggtccagccactcgaccagcgatcgcggcttggcggtccccggcacgagggtgagcacgtcgttgaggacgtcctcgcccgcggcccgggggcccccccggctggcaaagcgccccccgccgggcggctccaggcccgccagcaccgcctccgcgtccgacgcgcccagggctcccccgctgacggcctggtggaccagggcgccctggcggagccccgaggcgacgccggaggccgcgtgcttggggcgcgcgcggaccgggtggcggcgggtgacgtcctgcacggcccgctggaccagcgcgaggatctcctcgttctcttgcgtgatggacacgtcctccgcggtggccgtgtcgcctcccggggccgtgagctgctcctccggggagatgggggggtctggggtgccgacaacggccggcccggccccgcccgagaccgaggacgcctggggagtgggggtgccgctttcccccatccccagggacaggtgggccgccgcctccgtcgcggcggcgggagccgcggcccccagccgcgcgacgtagcgacaaaagtggcgacagaggcgcatgaggcgcgcgccgtcggccgcgtatcgcgtgtttggcgggacgagctcgtcgtaactgaacaggagcacgcgggcacaggtcgcccacgggccccacgccaggcgcagcgccgcgaccgtgtacgggtcgtacacgccttgggcgtcgcacgcgaccggcagggagacgaacagcccgcccgcgctggggacgcgcggcaggaggtccgggtgcgccgggatgacgggggctaggatcgcccccaccgcatccgccggcacgtaggcggcaaacgccgaacgccacggggtgcagtcgccggtcgcgtgggcccgggtctgggtttcgacccggaagttcgcggccgccccaccgtcggggcggccgcgcacgagggcggacagcgggacccccgccgccgccaggcactcgctggagatgatgacgtgaatcagcgaggcggggctgctcgggtcccgggtgagatcgtattggacctcgttggcaaagtgcgcgttcatggcccggccggcggtgcgagcccttcccggtgccggaaggggcgtgggtggggggtgcgtgtgcgcgtcctcggggcccgcgggcgcacgtgcgcttatacgctgtgtgtttcgtctgtccccagggaatccggggccaggactttaacctgcttttcgtcgacgaggccaactttattcgcccggatgcggtccagacgattatgggctttctcaatcaggccaactgcaagatcatcttcgtctcgtcgaccaacaccgggaaggccagcacgagctttttgtacaacctccgcggggccgccgacgagctgctcaacgtggtcacctatatatgcgacgaccacatgccgcgggtggtgacgcacaccaacgccacggcctgttcctgctatatcctgaacaaacccgtgtttatcacgatggacggcgccgttcgccggacggccgatctgtttctgcccgactccttcatgcaggagatcatcggggggcaggcccgcgagaccggcgacgaccggcccgtcctaacaaagtcggcgggggagcggtttctgctgtaccgcccctccaccaccaccaacagcggcctgatggcccccgagctgtacgtgtacgtggacccggcgttcacggccaacacgcgcgcctccggcaccggcatcgcggtcgtcgggaggtaccgcgacgatttcattatcttcgccctggagcactttttcctccgcgcgctcacgggatcggcccccgcggacatcgcccgctgcgtcgtgcacagcctcgcccaggtgctggcgctgcaccccggggcgtttcgcagcgttcgcgtggcggtcgagggcaacagcagccaggactcggccgtggccatcgccacacacgtgcataccgagatgcaccgcatcctggcctcggcgggggccaacggcccggggcccgagctcctcttctatcactgcgagccgcccggcggcgcggtattgtaccccttctttctgctcaacaaacagaagacgcccgccttcgaatactttatcaaaaagttcaactccgggggcgtcatggcgtcccaggagctcgtctccgtgacggtgcgcctgcagaccgacccggtcgagtatctgtccgagcagctcaacaacctcatcgaaaccgtctctcccaacaccgacgtccgcatgtactccggaaaacgcaacggtgccgcggacgacctcatggtcgcggtcatcatggccatttacctggcggccccgaccgggatccccccggccttttttccgatcacgcgcacgtcttgagtctttcttgccgtttcttttgtttctctttctttccccccctctctccgcaataaacgccttcccggaactgtgtttccccccctacaacagtgttgtccgttggttgggtggttggggtgcgggggtgggcgggggaagcaagaaaacggtcggcgaacacaacatcgggaaaacggattcccgcacgtgcgtcttcccagattcgacacacacaccccccttctccttaaataaacacaaaccacacgctcgttggttggttaatgccagcgctttatttacgtcttgttttttttgcgtttcctccgcgggtcccttcccaacacgcctgcccccgcctcaggggtagcggataaccggggccatgtcgccggattgcacaacggcggcgccgtcgaacgtacacacccgaaccgccggggccagggccaggatgtccccgagttggcccgcgtgcgccagccaggcgaccagcgcctcgtaaagcggcagcctgcgttcgccgtcctgcatcagcatgggggcttcggggtggatgagctgggcggcttctcgcgtgacgctctgcatctgcaggagcgcgttcacgtatccgtcctgggcgctcagcgcgagcagccgggggatgagcgtgaggatgagggtggttccttcggttatggagtagaccatgttgaggacgagcgaccgcagctcggtgtttacggaggcgagttgctggacgtcggccacgagcgagagacgggccccgttgtaatacagcacgttgaggtcggggagctccccgggcgtccgggggtcggggttgaggtcccggatgccccgggcgaccagccgcgcgactatctcgcgggccaggggcgttgggagcgggaccggaaaccgcagcgtgaggtccagcgactccaggcgcacgtccgtcgcctggccctcgaagacgggcgggacgaggctgacgggatccccgttgcagaggtcgacgggggaggtgttgcggagattgacggtgccggcgtgcgtgagccccaggtccacggggcaggcgacgattcgcgtgggcagcacccgcgtgattaccgcggggaagcgcctgcggtacgccagcaacaaccccaacgtgtcgggactaactcctccggagacgaacgattcgtgcgccacgtccgcgagcgccagctggcggcggatggtcggcagaaagaccactcgaccctcgcaccgctgcagcgccgcggcatcggggcgcgagatacccgaggggatcgcgatgtctgcttcgaaacaatccgtgatcatggcgccgggccgcgagacaccggaacgcgggggtgcgggagggccggaaagcgcaacgcaaccgggacgatgatgaaacagagatggggggcaccgaccgtgtgggagagggggcggggcagggctcagcagcacgcacggggaggtctgtcgtgcgcaggagccccaggtgagaatcagtcccccggagctcgggtctgggttttattgggacctgccctcggaatcgcggctcccagtccaagcccccctggggggggcggggacagggggtgtgtgtgggtaaaagcaacgtcggaaaatcaaacccaatgccccaaacaggaaaaaaaaagacgggcgggtggagggaaagctggggaagaagaagccaattttacagagacaggccctttagcggggaggcgtcgtagatgagatactgcgtaaagtgggtctctcgcgcgtgggcctccccatcgcgggcgctgcgtagcagggcggggtcgctggcgcaggtgatcgggtaggcttcctgaaacaggccgcacgggtcttccacgagctcgcggcaccccggcgggcgcttaaactgcacgtcgctggcagcggtggccgtggataccgccgatcccgtttccacgatgagacgctccaggcagcgatgtttggccgtgatgtcggccgcggtgaagaacttgaagcaggggctgaggacgggcgaggccccgttgaggtgataggccccgttgtacagcaggtccccgtacgagaaccgctgcgacgcccacgggttggccgtggccgcgaagggccgcgccgggtcgctctggccgtggtcgtacatgagggctatgacgtccccctccttgtcccccgcgtacacgccgccggccgcgcgtccccgcgggttgcagggccggcgaaagtagttgatgtccgtggccacgggggtggcgatgaactcacacacggcatcctgcccgtggtccatgccggcgcgccgcggcacctgggcgcagccaaagaccgggaggggctgggccggccccagccggtttcccgccacgaccgcgttgcgcaggtacacggcggccgcgttgtctagcagcgggggggccccgcggccgaggtaaaagttttgggggaggttgcccatgtccgtaacggggttgcggacggtgcccgtggccgcgacggcggtgtagcccacacccaggtccacgtttccgcgcggctgggtgagcgtgaagttgacccccccgcccgtttcgtggcgggccacctggagctggcccagaaagtacgcctccgacgcgcgctcggaaaacagcacgttctcggtcacgaagcggtcctgccgcacgacggtgaacccgaacccggggtggaggcccgtcttgagctggtgatacagggccacggggctcatcttgaagtaccccgccatgagcgcgtaggtcagcgcgttctcccccgccgcgctctcgcgggcgtgctgcaccacgggctggcggatggaggagaagtagttggcccccagggccggggggaccagggggacgtcgcgcgccaggtcgcgcagggccggggggaagttgggcgcgttggccacgtggtcggcgcccgcaaacagcgcgtggacgggcaggacgtagaagtattcgccattttggatggtgtggtccaggtgctggggggccatgagcagcacgccggcgtgcagcgccccgtcgaagatgcgcatgttggccgtcgacgcggtgttggcgcccgcgtcgggcgccgcggagcacagcagcgccgtcgtgcgctcggccatgttgtgcgccagcacctgcagcgtgagcatggcgggcccgtcgacgacgacgcgcccgttgtggaacatgcgcttgaccgtgttggccaccagattggcgggatgcagcgggtgggcggggtcggtcacgggatcgctcgggcactcctcaccgggggcgatctccgggaccaccatgttctgcagcgtggcgtacacgcggtcgaagcggacccccgcggtgcagcagcgcccccgcgagaaggccggcaccagcacgtaatagtagattttgtggtggacggtccagtcggccggccggtgcggccggtcgtcggcggcgtcggccgcgcgggcctgggtgttgtgcagcagccggccgtcgttgcggttaaagtcggccgtcgccacgttgcacgccgccgcgtagacgggctcgtgcccccccgcgtcaatccggcagtctcggtggcggtccagggccgcgtgtcgcataaggccgtcgcagtcccacacgaggggcggcagcagcgccgggtcgcgcatcaggtgattcagctcggcctgagcctgcccgcccagctccgggcccggcagggtaaagtcgtccaccagctgggccagggcctcgacgtgggccaccaggtcccgatacacggccatgcactcctcggggaggtcgcccccgaggtaggtcacgatgtacgagaccagcgagtagtcgttcacgaacgccgcgcatcgcgtgttgttccagtagctggtgatgcactgagtcacgagccgcgccagggcgcagaacacgtgctcgttgccgtgaatcgcggcttgcagcaggtaaaacaccgccgggtagctgcggtcctcgaacgccccgcggacggcggctatggtagccggcgccatggcgtggcggccaacgccgagctccaggccccgggcgtcacgaaacgccaccggacacagcgccaggggcaggttgccgttgaccacgcgccaggtggcctggatcgcccccggaccggccggggggacttcgccgccgggaagctcgacgtcggccacgcccgcgaagaagtcgaacgcggggtgcagctccagagccaggttggcgttgtcgggctgcatgaactgctccgcggtcatctggcactcggcgacccaccggacccggccgtgggcgaggcgctgccgccaggcgttcagaaaacgctgctgcatgtccgcgccggggccggccggggccgcgacgtacgccccgtacggattcgcggcctcgacggggtcgtggttcacgcccccgacggccgcgtcgatgttcatgagcgaaggatgacacacggtcccgaccgcgttctccatggacagccgcagaacctggtggtcctttccccaaaaaaacagctgccggggagggaacgcgcggggctccgggtggccgggggcgggcaccaggtccccggcgtgcgcggcgaagcgctccatggccgggttgaacagccccaggggcaggacgaacgtcaggtccatggcgcccaccagggggtagggcacgttggtggcggcgtagatgcgtctctccagggcctccaggaagaccagcctgtcgcctatggccaccagatccgcgcgcacgcgcgttgtctggggggcgctttcgagttcatccagcgtctcccggttcgcctcgagttgctcctcctgcatatccagcaggtggcggcccacgtcgtccaggctccgcacggccttgcccatcaccagcgccgtgacgaggttggccccgttcaagaccatctcgccgtaggtcaccggcacgtcggcctcggtgtcctccaccttcaggaaggactgcaggaggcgctgtttgatggcggcggtggtgaccagcaccccgtcgaccggccgcccgcgcgtgtcggcgtgcgtcaggcggggcacggccacggacggctgcgtcgccgtggtcaggtccacgagccaggcctcgatggcctcgcggcgatggcccgccttgcccaggaagaagctcgtgtcgcaaaagctccgcttcagctcggcgaccagggtcgcccgggcaaccctggtcgccaggcgcccgttgtcgagatatcgttgcatgggcaacagcagggccaggggaggcgccttctccaacagcacgtgcagcatctggtcggccgtgccgcgctcaaacgcccccaggacggcctggacgttgcgcgcgagctgctggatggcgcgcagctggcgatgcaggctaatgcccgtcccgtccagggcctcccccgtgagcagggcaatggcctcggtggccaggctgaaggcggcgttcagggcccggcggtcgatgaccttcgtcatgtaattatgcacgggctgctcgacggggtgcgggccgtcgcgggcgatgaggggctggtggacctcgaactgcacacgcccttcgttcatgtaagccagctccgggaacttggtgcacacgcacgccacggacaggccgagctccagaaagcgcacgagcgacagggtgttgcagtaggaccccagcagggcgtcaaactctacgtcatacaggctgttttcgtcggagcgcacggcggcgaaaaaatcaaagagtctgcggtgggacgccacctcgatcgtactcaggatggagccggtgggcaggatggccgcggcgtaccggtaacccggggggtcgcgggcaggagcggccattgggttccttgggggattcgcaggctccatcaagccgagctcgggaaggccaagcccctcccgcacaacgcctcaccgccggcggacgcgactaacaacccacgggccgccaaaaccccaaggggcaacccgaccaacaacaggcgaggggaggaaaggcgtaaagggggcgttgggaggcaaaaagaaagaaaacacccagacgtaggcccgaggaccggccggcgtcctctgtccccgagcacccactgtgcccaacaggcacgggggcgagctgcccctgccttatatacccccccgccacacccccgttagaacgcgacgggtgccttcaagatggccctggtccaaaagcgtgctagaaaaaagttggtaaaggcggcaaagcagtccgccgccgccacccacatggcggcgccggccgcgcaggcgattcccagagaacgggcgcggaggggatccgtgcggggcagcagctggctggcggtgatccaatggaaaagcccgtcgggactgaacgtctcatgggcggccgccaccagggcgcacagggccgcgccgcccatgatcacgcacaacccccaaaacacgggtggcgacaacggcaggcgatcccgtttgatgttcacgtacaggaggagcgcccgtgccagccacgtgacatagtaggcgaggacggcggctataatacatgccggcgccaccgcccgtccggtccacccgtaatacatgcccgcggccaccagctccagcggcttgaggaccaggaacgaccaagcaaacatcaccacccgcttggaaaagaccggctgggtgtggggcggaagacgcgagtaggccgaactgacaaaaaaatcagacgtgccgtacgaggacagcgaaaactgttcatcgagcggcagttctccgtcctccccgccacacgcggcctcgtctaccagctcgcgatccaacaaaggaacatcatcccgcattgtcatggtcggtgcggggagccggcgaggcagcaaaaccgaaagtagtgctggcggcgcgggcccgggtccggacccaagcttcagggatggggggcggaggccaaaatcaaacaagcaccgcgcgggttctacacacaacccccacccgggtagtatccgcggatgcgagtgcctggcgaagtcacgtcccagcaggatataaacctcggccgttgggcccggaacccccgaaattcacacccacgccctgacgcccaaatcatgggtggatgtggttcgcgagccgcacatccgtgcgtccgccctcccccgcgggctgatgacgtggcggttagtcagtgggaaggcagggggaaagatgggttgggggaggaaacgaagaaaacacccagagggccacgtcgggaatgcgcccggagttgtccttaaaaggccggccgtgcgtgacggaagccgtcgtttgcccaagcaccgacgccgcgatccacagtggggggagttcctccgtccggccacaaccctacgcgcgggcggcacgcgcgagagcaacccacgggtcccgttcgcgccaccgccagcccttgctcccaccaccctcctcccaccaccccactattcccccccccaagtccgccccgtggctcgccggccatggagctcagctatgccaccaccctgcaccaccgggacgttgtgttttacgtcacggcagacagaaaccgcgcctactttgtgtgcggggggtccgtttattccgtagggcggcctcgggattctcagccgggggaaattgccaagtttggcctggtggtccgggggacaggccccaaagaccgcatggtcgccaactacgtacgaagcgagctccgccagcgcggcctgcgggacgtgcggcccgtgggggaggacgaggtgttcctggacagcgtgtgtctgctaaacccgaacgtgagctccgagcgagacgtgattaataccaacgacgttgaagtgctggacgaatgcctggccgaatactgcacctcgctgcgaaccagcccgggggtgctggtgaccggggtgcgcgtgcgcgcgcgagacagggtcatcgagctatttgagcacccggcgatcgtcaacatttcctcgcgcttcgcgtacaccccctccccctacgtattcgccctggcccaggcgcacctcccccggctcccgagctcgctggagcccctggtgagcggcctgtttgacggcattcccgccccgcgccagcccctggacgcccgcgaccggcgcacggatgtcgtgatcacgggcacccgcgcccccagaccgatggccgggaccggggccgggggcgcgggggccaagcgggccaccgtcagcgagttcgtgcaagtgaagcacatcgaccgtgttgtgtccccgagcgtctcttccgcccccccgccgagcgcccccgacgcgagtctgccgcccccggggctccaggaggccgccccgccgggccccccgctcagggagctgtggtgggtgttctacgccggcgaccgggcgctggaggagccccacgccgagtcgggattgacgcgcgaggaggtccgcgccgtgcatgggttccgggagcaggcgtggaagctgtttgggtcggtgggggctccgcgggcgtttctcggggccgcgctggccctgagcccgacccaaaagctcgccgtctactactatctcatccaccgggagcggcgcatgtcccccttccccgcgctcgtgcggctcgtcggtcggtacatccagcgccacggcctgtacgttcccgcgcccgacgaaccgacgttggccgatgccatgaacgggctgttccgcgacgcgctggcggccgggaccgtggccgagcagctcctcatgttcgacctcctcccgcccaaggacgtgccggtggggagcgacgcgcgggccgacagcgccgccctgctgcgctttgtggactcgcaacgcctgaccccgggggggtccgtctcgcccgagcacgtcatgtacctcggcgcgttcctgggcgtgttgtacgccggccacggacgcctggccgcggccacgcataccgcgcgcctgacgggcgtgacgtccctggtcctgaccgtgggggacgtcgaccggatgtccgcgtttgaccgcgggccggcgggggcggctggccgcacgcgaaccgccgggtacctggacgcgctgcttaccgtttgcctggctcgcgcccagcacggccagtctgtgtgagatatcccaataaagtgcagtcgttttctaacccacggatgccgttgtatgcctatacgggggactatggggggggaaaggaaaggaaacaggaatggagaagggaaaggaacagaggcggtagcggacgcacggcggacacaataacaaacagaccgcggacacggagggagtcggttgggttgggcgtggacgccgctgcgtccacacacccgtttattcgcgtctccacaaaaatgggacgcacgttcggaccaccctaaggatgcccgccagggccgcggtaatcataacgacccccagcgcggacgcggccagaaacccgggggcgatggtggcgatgggcagcgtgtcaaaggccagcagatgaatcacagttccgttggggaacaacaacagggccacggacggcacgtcgctggaaaacacgttcggggtgcccgccaccggcccctgggccagctgctgttgggtggcatccgtgtccaccagcagcaccgacatgacctccccggccggggtgtagcgcagaaacacggcccccacgaggccgaggtcgcgccggttttcggtgcgcaccagccgcttcggctcaatctcccgcgcgtgcccttcgcaggtggcggtgagataggtgataaacagcgggcggcggacgtcaacgcccgtaagcttgtatccgatcccgcggggcaagggggtgtgggtgacgacgtagctggcgttgtgggtgatgggcacgaggatccggggctccgcgttgtgcgacgggccgctacactggtgggtggcctccgggacgaaggcgcggatcagggcgttgtagtgcgcccagcgcgtgagaacggaggccacgccgcgggtctgttgtgccatgacgtccgccgggatgtcggatcgggtggccatggccagcgcgtccaggatgaacccgccctcggcgagatcgaagcgcagggaagctgcgcatggggaaaagtggtccgggagccagaagaggtttttctggtggtcggtcctggctagcgcggcccggagatcggcgtgggtcgccgcggcgacgtcggacgtacacagggccgtggttatgaggaggccccggcgggcgcgttcccgctgctcggccgagggcgcgcccgccaggaacggcgcccggaggacggccgtggcgtaaaacagcgctcggcggaccatcggggcggttagcgcgcggccgccgagaaactcggcgtacagggcgtcgatcaggcgggccgcgctcggggccaccgcgccataggccgcggggctgtccaacacgaacgccagctgatagcccagcgcgtgcgccaccaggctctgctctcgctcgaggatcgcggccaccagatgcccgaggcgcgcctccagccgcaggcgggccgccgggtccaacacggacacgttcaggaacaccgagtcggccgcgcagcccgctgctccccgggcggccaggccggccagcacgcgcgagtgggccaaaaagcccagcaggtcggagaggcgaatcgcgtcgtgggcgtgggccgcgttgacgaacgcaaaccccgacgaggcgagcagccccgcgaggcgccagaacagggacggacgcgcgtccgtgccggagcccgggtcctcccccaaaaactccgcataggcccgcgacatatactgggcgtagttcgtgctctcctcggggtagccggccacccgccggagggcgtccagcgccgagccgttgtcggcgggcgtcggggcccccaggacaaagacgcgatacctggggccggccggaggcccggggagcaccgcgggggcgttttcgtcggtcggatttccgacccgagcgagggtcttgtccgcaggcaccactatgatctcggccggagggctgtcccgcatcgatatcacgagccccatgaagcccttcccgtatcgcgcgcgcacgagcgcggcgtcgcacccgaacgccagcccgcccgtcgtccagacgcccacgggccacgtcgaggccgacggggagaggtacacgtaccgacccggagtccgtagcaggcccctggcggccagccaggtcacggatgcgttgtgcagatgcgcgatgctcaggttcgtcgtcggatgcctcggtgtccccgcgggcggccccgggggcggcgcgttgcgtcggccgtccgggtgcctctcggtcgccccgtcgtctccccgcgggaacgtaagcccctcgcggtccggcgcggccgcgaatgttacccaggcccgggaccgcaacagcgcggaggcgccggggttgtgcgacagtcccttgagctgggtcacctcggcggggggacgggacgtgggccccgcctcggggagctcgggcaggctcgcgttccgaggccggccgagcagataggtctttgggatgtaaagcagctgcccggggtcccgaggaaactcggccgtggtgaccaacacgaaacaaaagcgctcggcgtaccaccgaagcatgggcacggatgccgtagtcaggttgagttcgcccgggggcgccaagcgtccgcgctgggggtcgctggcgtcgggggtgttgggcaaccacagacgcccggtgtttgtgtcgcgccagtacgtgcgggccaaccccagaccgtgcaaaaaccacgggtcgatttgctccgtccagtacgtgtcatggcccccggcaacgcccaccaggacccccatcaccacccacagaccggggcccatggtcgtcgtcccggctgccagtccgcagatgggggggggtgtccgtacccacggcccaaagaggctccgcacctcggaggctatcggaggccctttgttgccgtaagcgcgggccaaaggatggggtggggtgagggtaaaagcacaaagggagtaccagaccgaaaacaaggacggatcggcccgctccgtttttcggtggggtgctgatacggtgccagccctggccccgaacccccgcgcttatggacacaccacacgacaacaatgccttttattctgttcttttattgccgtcatcgccgggaggccttccgttcgggcttccgtgtttgaactaaactccccccacctcgcgggcaaacgtgcgcgccaggtcgcgtatctcggcgatggacccggcggttgtgacgcgggttgggatcatcccggcggtgaggcgcaacagggcgtctcgacacccgacgggcgactgatcgtaatccaggacaaatagatgcatcggaaggaggcggtcggccaagacgtccaagacccaggcaaaaatgtggtacaagtccccgttgggggccagcagctcgggaacgcggaacagggcaaacagcgtgtcctcgatgcggggcagagaccccgcgccgtcctcggggtcggggcgcggggtcgccgcggcgacccccgtcagccggccccagtcctcccgccacctcccgccgcgctgcaggtaccgcaccgtgttggcgagtagatcgtagacacggcgaatggcggacagcatggccaggtcaagccgctcgcccgggcgttggcgtctggccaggcggtcggcgtgttcggcctccggaaggacacccaggaccaggttcgtgccgggcgcggtcgggggcatgagggccacgaacgccaacacggcctggggggtcatgcttcccatgaggtaccgcgcggccgggtagcacagcagggaggcgatagggtgccggtcgaaaacaagggtgagggccgggggcggggcttgcgggcccacagcctcccccccgatatgaggagccaaaacggcgtccgtcgccgcataaggcgtgctcattgttatctgggcgctggtcattaccaccgccgcctccccggccgatatctcgccgcggtccagacggtgctgcgtgttgtagatgttcgtcagggtctcggaggcccccagcacctgccagtaagtcatcggctcggggacgtagacgatattgtcgcgcggccccagggcctccatcagctgcgcggaggtggtggtcttccccaccccgtggggtccgtctatataaacccgcagcagcgtgggcagctccggatccccgcgggctccggaggccccctggcgatggctaggacgggacgccgcgcggccgtcggtaggcccgctcgcacgagcagcctgaccgaacgcaggcgcgtgctgttggccggcgtgagaagccatacccgcttctacaaggcgttcgcccgagaggtgcgggagttcaacgccaccaggatttgtggaacgctgctgacgctgatgagcgggtcgctgcagggtcgctcgctgttcgaggccacgcgcgtcaccttaatatgcgaagtggacctcgggccgcgccgcccagactgcatctgcgtgttcgaattcgccaatgacaaaacgttgggaggtgtgtgcgtcatcctggagctaaagacatgcaaatcgatttcttccggggacacggccagcaaacgcgaacagcggaccacgggcatgaagcagctgcgccactccctgaagctgctgcagtcgctcgcgcctccgggggacaaggtcgtctacctgtgtcctattttggtgtttgtcgcgcagcgtacgctgcgcgtcagccgcgtgacccggctcgtcccgcaaaagatctccggcaacatcaccgcggccgtgcggatgctccaaagcctgtccacgtatgccgtgccgccggaaccgcagacccggcggtcgcggcgccgggtcgccgcgaccgccagaccgcaaaggcccccctccccgacacgtgacccggaaggcacggcgggtcatccggccccaccagagagcgaccccccctccccaggggtcgtaggcgtcgctgcggagggtgggggtgtgcttcagaaaatcgcggcgcttttttgcgtgccggtggccgccaagagcagaccccggaccaaaaccgagtgaggttctgtgtgttgtttttttttttttttttcctcgttttgttttctcttctttcccccccccctcccccgcttctggccaagcatcctcacctgcttaagcggaacccgcgggcgcgcggggactcatttgtcgccggcgacacccacccgacaacagcccctgggtgtcgaccgctgtcgcccccgtctgtcgcctctcccttttttccccccctcaaagaacgtggtgttgggcgccggccaattcttcccggagcgccgtcgtcgcccgcccgccgccctcgaacatggacccgtactaccctttcgacgcgctggacgtttgggaacacaggcgcttcatcgtcgccgactccaggagcttcatcacccccgagttcccccgggacttctggatgttgcccgtgttcaacatcccccgggagacggcggcggagcgggcggcagtgctgcaggcccagcgcaccgcggccgcggcggccctggagaacgccgccctccaggccgccgagctgcccgtcgacatcgagcgccggatacgcccgatcgagcagcaggtgcatcacatcgccgacgccctggaggcgctggagaccgcggcggccgcggccgaagaggcggatgccgcgcgggacgccgaggcgaggggggagggcgctgcggacggggcagcgccgtcgcccaccgcgggccccgccgccgcggagatggaggttcagatcgtacgcaacgacccgccgctacgatacgataccaacctccccgtggatctgctacacatggtgtacgcgggccgcggggccgcgggttcgtcgggagtcgtctttggtacctggtaccgcacgatccaggaacgcaccatcgcggacttccccctgaccacccgcagcgccgactttcgagacgggcgcatgtccaagaccttcatgaccgcgctggtcctgtctctgcagtcgtgcggccggctgtacgtgggccagcgccactattccgccttcgagtgcgccgtgctgtgtctgtatctgctgtaccgaaccacccacgagtcctcccccgatcgcgatcgcgctcccgttgcgttcggggacctgctggcccgcctgccgcgctacctggcgcgtctggccgcggtaatcggcgacgagagcggacgcccgcagtaccgctaccgcgacgacaagctgcccaaagcgcagttcgcggcggccggcggccgctacgagcacggggccctggccacccacgtcgtgatcgccacgttggtgcgccacggggtgctaccggcggccccgggcgacgttccccgagacaccagcacccgcgtgaaccccgacgacgtggcccaccgcgacgacgtcaaccgcgccgccgccgcgtttttggcacgcggccacaacctcttcctgtgggaggaccagacgctgctgcgggcgaccgccaacaccattacggccctggccgtgcttcggcggctcctcgcgaacggcaacgtgtacgcggaccgcctcgacaaccgcctgcagctgggcatgctgatcccgggagccgtcccggcggaggccatcgctcggggggcgtccggattggactcgggcgccataaaaagcggcgacaacaacctggaggcgctgtgcgttaactatgtacttccgctgtatcaggcagaccccacggtcgagctgacccagttgtttccggggctggccgccctgtgcctggacgcccaggcggggcggccactggcgtcgacgaggcgcgtggtggatatgtcgtcgggcgcccgccaggcggcgctcgtgcgcctcaccgcgctggagctcatcaaccgcacccgcacaaacaccacccctgtgggggagattattaacgcccacgatgccttggggatacaatacgaacaggggcctgggctgctcgcccagcaggcacgcatcggcttggcgtcaaacaccaagcgattcgccacgttcaacgtgggcagcgactacgacctgttgtactttttgtgtctcgggttcattccccagtacctgtccgtggcctagggaagggtgggggtggtggtggtggggtgtttttctgttgttgtttctggtccgcctggtcacaaaaggcacggcgccccgaaacgcgggctttagtcccggcccggacgtcggcggacacgcaacaacggcgggccccgtgggtgggtaagttggttcgggggcatcgctgtattcccttgcccgcttccaccccccccccccttcccgttttgtttgtttgtgcgggtgcccatggcgtcggcggaaatgcgcgagcggttggaggcgcctctgcccgaccgggcggtgcccatctacgtggccgggtttttggccctgtacgacagcggggacccgggcgagctggccctggacccagacacggtgcgtgcggccctgcctccggagaaccccctgccgatcaacgtagaccaccgcgctcggtgcgaggtgggccgggtgctcgccgtggtcaacgaccctcgggggccgttttttgtggggctgatcgcgtgcgtgcagctggagcgcgtcctcgagacggccgccagcgccgctatttttgagcgccgcggacccgcgctctcccgggaggagcgtctgctgtacctgatcaccaactacctgccatcggtctcgctgtccacaaaacgccggggggacgaggttccgcccgaccgcaccctgtttgcgcacgtggccctgtgcgccatcgggcggcgccttggaaccatcgtcacctacgacaccagcctagacgcggccatcgctccgtttcgccacctggacccggcgacgcgcgagggggtgcgacgcgaggccgccgaggccgagctcgcgctggccgggcgcacctgggcccccggcgtggaggcgctcacacacacgctgctctccaccgccgtcaacaacatgatgctgcgtgaccgctggagccttgtggccgagcggcggcggcaggccgggatcgccggacacacgtaccttcaggcgagcgaaaaatttaaaatatggggggcggagtctgcccctgcgccggagcgcgggtataaaaccggcgccccgggtgccatggacacatcccccgccgcgagcgttcccgcgccgcaggtcgccgtccgtgcgcgtcaagtcgcgtcgtcgtcttcttcttcttcttttccggcaccggccgatatgaaccccgtttcggcatcgggcgccccggcccctccgccgcccggcgacgggagttatttgtggatccccgcctctcattacaatcagctcgtcaccgggcaatccgcgccccgccacccgccgctgaccgcgtgcggcctgccggccgcggggacggtggcctacggacaccccggcgccggcccgtccccgcactacccgcctcctcccgcccacccgtacccgggtatgctgttcgcgggccccagtcccctggaggcccagatcgccgcgctggtgggggccatcgccgccgaccgccaggcgggtgggcttccggcggccgccggagaccacgggatccgggggtcggcgaagcgccgccgacacgaggtggagcagccggagtacgactgcggccgtgacgagccggaccgggacttcccgtattacccgggcgaggcccgccccgagccgcgcccggtcgactcccggcgcgccgcgcgccaggcttccgggccccacgaaaccatcacggcgctggtgggggcggtgacgtccctgcagcaggaactggcgcacatgcgcgcgcgtacccacgccccctacgggccgtatccgccggtggggccctaccaccacccccacgcagacacggagacccccgcccaaccaccccgctaccccgccaaggccgtctatctgccgccgccgcacatcgcccccccggggcctcctctatccggggcggtccccccaccctcgtatcccccagttgcggttacccccggtcccgctcccccgctacatcagccctcccccgcacacgcccacccccctccgccgccgccgggacccacgcctccccccgccgcgagcttaccccaacccgaggcgcccggcgcggaggccggcgccttagttaacgccagcagcgcggcccacgtgaacgtggacacggcccgggccgccgatctgtttgtgtcacagatgatggggtcccgctaactcgcctccaggatccggacttggggggggtgtgtgttttcatatattttaaataaacaaacaaccggacaaaagtatacccacttcgtgtgcttgtgtttttgtttgagaggggggggtggagtgggggggaaagtgggccgaatgacacaaaaattaggtcggaggggtgaggggggggggctaggagccgaaccgatggcccccacacgcgacggaaggcccggaagactaccacggggagggggtgtggaaagcgaccggtcgcagggagacggggttggtttggggttggtttggggttggttttcccgttagcacatgtctgcatttgtttttctagtcacacgcccccccccccccaaataaaaaccaaggcaaaacaataccagaagtcatgtgtatttttgaacatcggtgtctttttatttatacacaagcccagctcccctcccctcccttagagctcgtcttcgtctccggcctcgtcctcgttgtggagcggagagtacctggctttgttgcgcttgcgcagaaccatgttggtgaccttggagctgagcagggcgctcgtgcccttctttctggccttgtgttccgtgcgctccatggccgacaccaaagccatatatcggatcatttctcgggcctcggccaacttggcctcgtcaaacccgcccccctccgcgccttcctccccctccccgcccacgcccccggggtcggaagtcttgagttccttggtggtgagcggatacagggccttcatgggattgcgttgcagttgcaggacgtagcggaaggcgaagaaggccgcgaccaggccggccaggaccagcagccccacggcaagcgccccgaaggggttggacataaaggaggacacgcccgagacggccgacaccacgccccccactactcccatgactaccttgccgaccgcgcgccccaagtcccccatcccctcgaagaacgcgcacagccccgcgaacatggcggcgttggcgtcggcgcggatgaccgtgtcgatgtcggcaaagcgcaggtcgtgcagctggttgcggcgctggacctccgtgtagtccagcaggccgctgtccttgatctcgtggcgcgtgtagacctccaggggcacaaactcgtggtcctccagcatggtgatgttcaggtcgatgaaggtgctgacggtggtgacgtcggcgcgactcagctggtgagagtacgcgtactcctcgaagtacacgtagcccccgccgaagatgaagtagcgccggtggcccacggtgcacggctcgagcgcgtcgcgggtgaggcgcagctcgttgttctcgcccagctgcccctcgatcagcgggccctggtcttcgtaccgaaagctgaccagggggcggctgtagcacgtccccggccgcgagctgacgcgcatcgagttctgcacgatcacgttgtccggggcgacgggcacgcacgtggagacggccatgacgtctccgagcatgcgcgcgctcacccgccggccgacggtggcggaggcgatggcgttggggttgagcttgcgggcctcgttccagagagtcagctcgtggttctgcagctcgcaccacgcgacggcgatgcgccccagcatgtcattcacgtggcgctgtatgtggttatacgtaaactgcagccgggcgaactcgatcgaggaggtggtcttgatgcgctccacggacgcgttggcgctgggcgcctcccgcagtggcgcgggcgtggcattccggggcttgcggtcctgctcccgcatgtactcccgcacgtacagctcggcgagcgtgttgctgaggaggggctggtacgcgatgaggaagccccccgtggccaggtagtactgcggctggcccaccttgatgtgcgtggcgttgtacttgcgcgcaaacatgcggtcgatggcctcgcgggcatcccggccgatgcagtcgcccaggtcgacgcgcgagagcgagtactcggtcaggttggtggtgaaggtggtcgagatggcgtcggaggagaagcggaaggagccgccgtactcggcgcggagcatctcgtccacctcctgccacttggtcatggtgcagaccgccggtcgcttcggcacccagtcccaggccacggtaaacttgggggtcgtcagcaagttgcgggtcgtcggcgacgtggcccgggccttcgtggtgaggtcgcgcgcgtagaagccgtcgacctgcttgaagcggtcggcggcgtagctggtgtgctcggtgtgcgacccctcccggtagccgtaaaacggggacatgtacacaaagtcgcccgtcgccagcacaaactcatcgtacgggtacaccgaccgcgcgtccacctcctcgacgatgcagttgaccgtcgtgccgtaccgatggaacgcctccacccgcgaggggttgtacttgaggtcggtggtgtgccacccccggctcgtgcgcgtggcgaccttcgccggcttgagctccatgtcggtctcgtggtcgtcccggtgaaacgcggtggtctccatgttgttccgcacgtacttggccgtggagcggcagacccccttggtgttaatcttgtcgatcacctcctcgaagggaacgggggcgcggtcctcgaatatccccataaactgggagtagcggtggccgaaccacacctgcgacacggtcacgtctttgtagtacatggtggccttgaatttgtacggggcgatgttctccttgaagaccaccgcgatgccctccgtgtagttctgcccctccgggcgcgtcgggcagcggcgcggctgctcaaactgcaccaccgtggcgcccgtcgggggcgggcacacgtaaaactgggcatcggcgttctcgaccttgatttcccgcaggtgcgcgcgcagcgtggcgtggccggcggcgacggtcgcgttggcgtcggggggcggggtcgcctcgggccgcttgggcggctttttggttttccgcttccgggccttggtggtcgcggggctcgggacggggggcggccgggaggcgggacccccgttcgccgcgacggtcgcggccacgccgcccgaggcgcggggggccgccggggccgccggggccgccgacgccaccgcggccaccagcgcccccacgaccagcgcgcaaatcaagccccccccgcgcatggcgggcctacgggggcgcgtcgctcccgccgcccgctagtctgggggcgaggtgctgcaggaccgagtagaggatggaaaaaacgtctcggtcgtaaaccacgaccgagcggggtccgatgcagccgtcggggccgctctcgacgatggccaccagcggacagtcggagttgtacgtgaggtacacgcccggcgggtagcggtacagaccttcggaggtcgggcggctgcagtcggggcggcgcaactcaagctccccgcaccggtagaccgacgcaaagagtgtggtggcgataatgagctcgcgaatatatcgccaggcggcgcgctgggtgggcgtgattccggaaacaccgtcaaaacagtagaacttttgaaactcgctgacggcccaatcagcgcccgaaccccccgcgcccatgatgaagcgggcgagttcctccttgaggtgcggcaggagccccacgttctcgacgctgtagtacagcgcggtgttggggggctgggcgaagctgtgggtggagtggtcgaacaggggcccgttgacgagctcgaagaagcgatgggtgatgctggggagcagggccgggtccacctggtggcgcagcagcgacgctcgcatgaaccggtgcgcgtcaaacacgcccggggcggcgcggttgtcgatgaccgtgcccgcgcccgccgtcagggcgcagaagcgcgcgcgcgccgcgaagccgttggcgaccgcggcgaaggtcgcgggcagcacctcgccgtggacgctgacccgcagcatcttctcgagctccccgcgctgctcgcgcacgcagcgcccgaggctggccagcgaccgcttggtcaggcggtccgcgtacagccgccggcgctcccgcacgtccgcggcggcccgcgtcgcgatgtcgccccagctctccggcccctgcgcccctggctcggggccgcgctccccgtcctcgctcgcgggcgtccccgcgccacgcctccgccccccctcctccgcggcggcccggggctcttcctcctcggcccccccggtcgcgccgccggcccccagccgcgccagcacgcggcgcagcgcctcctcgtcgcactgctcggggctgacgagccgccgcagcagcggcgtcgtcaggtggtggtcgtagcacgcgcgtatcagcgcctcgatctgatcgtcgggcgacgtcgcctggccgccgatgatcagggcgtccaccatgtccagcgccgccaggtggcccccgaacgcgcgatcgaagtgctccgcccgccgcccgaacagcgccagctccacggccaccgcggcggtctcctgctgcagctcgcgctgcgccagcgcgttcaggttgtcggcgaaggcgtccatggtggagtggcgggcgcgatcgccggacgccagccagaagcgcagctcgctgatggcgtacaggccgggcgtagtggcctgaaacacgtcatgcgcctccagcagggcgtcggcctcctcgcggacagaagagctatcggcgggcggcgggccggccctggccccgccgcccgccgcggtccgcgccagcgcctggtccagcacacagagcgctcgcgcgcgggcggcgtccgacagcccggcggcgtggggcaggtaccgtcgcagctcgttggcgtccagccgcacctgggcctgttgggtgacgtggttacagatgcggtccgccaggcggcgggcgatggtcgccccttggttcgcggtgacgcacagctcctcgaaacagaccgcgcacgggtgggacgggtcgctcagctccgggggcacgatgaggcccgaccccaccgccgccaccataaactcccggacgcgctccagcgcggccgtggcgccgctcgggggggtgatgaggtggcagtagttcagctgcttgagaaaattctcgacatcatgcaggaagcacagctccatgcggacgtccccgccgtacgtctgcagccggatctgctggtggtacggacagggtcgggccagacccatggtctcggtgaaaaaggcagagacgtcacccgtggtcgcgaacgtttccaggtggcccaggagccgctccccctcgcgccacgcgtactccaggagcaactccagggtgaccgacagcggggtgagaaaggcggcggcctgagcctccagccccggccgcaggtgccgccgcagcacgcgcacctggagcgcgttgagttttagctgggcgagcttccccaggccgatctgggggtcgcatcgtcgaagcagctctagctgaaaaacgtacgtctgtacctgcccgagcagggccaacagtttctgtcgggccgcagtgggctcggaaaccgcggccgggggcgcggccgccatggcgagtcacccggccgtgctgtggtttagttaaggtttgggggggggtgggtcagaggcgcgccccgcgcggactgatgcggcggcgggcccctgacatcccctctttatgcccgtcgcccgcccgcccgccccgccggtgtgccgtgattcgcggagtcggggccttgtgtttctttctttcccccccgaatccgttctttcttcctcacccccccctccccacacacccacccaggactcgccaccacaaggaggcgagagcccgtcgctaacccaaagacacagtcacgagacacgatatcgactgtagttgcgatcgtttattttatacacaacaccaacctttccttcgaccccccccacccccgcccctagagcatatccaacgtcaggtcctttttctccggtggtccctccccaaacggatcgtcgccgtgaaacgcccgctttcgggcgacgccggccgcccccgccgccgccgccaaaccgccgaacgacgccgcgtggtcatcctcgtcgccgaaatccccaaagttaaacacctccccggcggcgccgagctggctgaccagggcctccgcctcgtgggccacctccagggccgcgtcggtcgaccactcgccatgcccgcgctccagggcgcgggtggtaaactccatcatttcctcgctcaggtactcgtcctccagcagcgccagccagtcctcgatctgcagctgctgggtgcgggggcccaggctcttgacggtcgccacaaacacgctgctggcgaccgccgccccgccctccgcaatgatgccccggagctgctcgcacagcgaatgctcgtgggccccgcccccgagactcgacgccgcgcacacaaacccggccctggggcaggccaggacaaacttgcgggtgcggtcaaagatcagcagcgggcacgcgtttttgccgcccagcaggctggcccagttcccggcctgaaacacgcggtcgttgccggccatgccgtagtatttgctgatgctgaggcccagcacgaccatcgggcgcgcggccatcacgggccgcagcaggttgcagctcgcgaacatggacgtccaggcgccggggtgcgcgtcgagggagtccatcagcgcgcgggccccggcctccaggcccgcgccgccctgcggggcccaggcggccgccgcctgcacgctggggggacggcgggacccggcgatgacggccgtgagggtgtttatgaagtacgtcgagtggtcgcagtacctcaagatctggttggccatgtagtacatggccagttcgctcacgttattgggggccaggttgataaagttaatcgcgccgtagtccagggagaacctcttaatgaacgcgatggtctctatgtcctcgcgcgacaagagccgggcggggagctggttgcgctggagggcggtccagaaccactgcgggttcggctggttcgaccccgggggcttgccgttgggaaagatgaccgcgtggaactgcttcagcaggaagcccagcggtccgaggaggatgtccacgcgcttgtcgggcttctggtaggcgctctggaggctggcgacccgcgccttggcggcctcggacgcgttggcgctcgcgcccgcgaacaacacgcggctcttgacgcgcagttccttgggaaacccaagggtcacgcgggcaacgtcgccctcgaagctgctctcggcgggggccgtctggccggccgttaggctgggggcgcagatagccgccccctccgagagcgcgaccgtcagcgtcttcgccgacaggaacccgttgttgaacaggtccatgacgcgccgccgcagcaccggttggaattgattgcgaaagttgcgcccctcgaccgactgcccggcgaacaccccgtggcactggctcagggccaggtcctggtacacggcgaggttggaccgccgcgcgaggagctgcagcagggggcacggcccgcaggtgtacgggtccagcgacagcgacatggcgtggttggcctcggccagaccgtcgcggaacttaaagttgcgcccctcgatcaggttgcgcatcagctgttccacctcgcgatccaccagctgcttgatgttgttcaccaccgtgtgcagggcctcgcggttgccgataatcgtctccagcctccccagggccgtgggcaccgcctggtccacgtactgcagggcctcgagctcggccatgacgcgctcggtggccgcgcggtacgtctcctgcatgatggtccgggtgttctcggacccgtccgcgcgcttcagggccgagaaggcggcgtagttccccagcacgtcgcagtcgctgtacgcgctgttcatcgttccgaagaccccaatggccccccgggcggcgctcgcgaacttggggtggcgggcccgcagccgcatcagcgtcgtgtgcgcgcaggcgtggcgggtctcgaaggtacacaggttgcagggcacgtcggtctggcccgagtccgcgacgtagcgaaacacgtccatctcctggcgcccgacgatgactccgccgtcgcagcgctccaggtaaaacagcatcttggccagcagggccggagagaacccgcacagcatggccaggtgctcgccggcgaactcctgggttccgccgacgaggggcgccgtggggcgcccctcgtacccgggcaccacgtggccctcgcggtccagctgcgggttggccgccacgtgcgtgccgggcacgagaaagaagcggtaaaaggagggcttgctgtggtccttggggtccgccggcccggcgtcgtccacctcggtcaggtggagggccgaattggtgctgaacaccatggcgcccacgaggcccgcggcgcgcgccaggtacgccccgacggcgccggcgcgggccgcgggcgtttcctggccctcaagcaggggccacgtggtgatgtcggggggcggctcgtcaaagaccgccatcgacacgatggactccagggccagggcggcgtcgcccgccatcaccgaggccaggcgctgctcaaacccgcccgccgggcccttgttcccggcgtcgcgcgcgccccgctggggcttaccctggctggcctcgaaggccgtgaacgtaatgtcggcggggagggccgcgccctcgtggttttcgtcgaacgccaggtgggcggccgcgcgggccacggcgtccacgttccgggcacgcagggccacggcggcgggcccgacgaccgcctcgaacagcaggcgggcgagggggcggttgaaaaacggaagggggtagttgaaattctccccgatcgatcggtggttgcagttaaacggatcggcgatgacccggctaaaatccggcataaacatctgcagcggatacacggggatgcggtgaacctccgcgtccccgatggttaccttgtccatcccgcccagatgcaggaaggtgttgctgatgcacacggcctcccggaagccctccgtgatcaccagatacagcaaggcccggtccgggtccagtccgagccgctcgcacagcgcgtcccccgtcgtctcgtgctttaggtcgcagggccggggcgcgtagtccgcgaagccaaaatgcgggcgcgcccgctcgcagagccgcgtcaggttgggggcctgggtgctgggggccaggtggcggccgccgtgaaagacgtaaacggacgggctgtagtgcgagggcataagcttgagggacaccgcggtccccccaaggcccgtcgtgcgggacccgacgaccgcggccacgttggcctcaaacccgctctccacggtcaggccgacgatgaggggcgcgacggcgacgtccgcgtcgccgctgcgcgccgacagtagcgacagcagctccaggccttcggccggacaggcgcggccatacacgtaccccatcggccccggaggaaccttgacggtggtcgtcgttttgggcttggtgtccatggctttcgggagatcggcgaccggcaggaacgggggcccggcaagacgaccgggggcagacgggggaggccgcgcgtggtcgacggctgctgcccgccgtcgtctctccgatggggtcgaatgccggcgctgggggtggggtctacacccgcccgttcgccgagcggcccctggtgggggtgggatgggtgggatggggtgggcgagaatggcccgccaccggatcgcgccggacgggggggcccggggttgggcaaggtttgggcgcaaggctccagcggcgattcgagaggcctgcggatggcggcccagagctgggtatgctcggccggggcggccggtatatgtacggcgtgctgggaggggcggcgtcgggccccgcccacggtccgccacgccccgcgcgtcatcggcagggggcgtggccgcccttctaaaaaaagtgagaacgcgaagcgttcgcactttgtcctaataatatatatactattaggacaaagtgcgaacgcttcgcgttctcactttttttagaagggcggccacgccccctttgacgtcacgctcacccgggcggccggccgcccataagcgcggcctgccgggccgataaaaagaaaccgcggcgcccccgcggacaccacacactggctctcgaaccccggacgcgcagaagggacccgggcgcgggtccgccggtaagagccggggggaacatcggcaccgccatcccaccccgagctgttgggtgggcgggtgggggggctggtgaggcggtggtgggagggggcggcgtatagcaggacaacgaccggcggcgatgttttgtgccgcgggcggcccggcttcccccggggggaagccggcggctcgggcggcgtctgggttttttgccccccacaacccccggggagccacccagacggcaccgccgccttgccgccggcagaacttctacaacccccacctcgctcagaccggaacgcagccaaaggccctcgggccggctcagcgccatacgtactacagcgagtgcgacgaatttcgatttatcgccccgcgttcgctggacgaggacgcccccgcggagcagcgcaccggggtccacgacggccgcctccggcgcgcccctaaggtgtactgcgggggggacgagcgcgacgtcctccgcgtgggcccggagggcttctggccgcgtcgcttgcgcctgtggggcggtgcggaccatgcccccgaggggttcgaccccaccgtcaccgtcttccacgtgtacgacatcctggagcacgtggaacacgcgtacagcatgcgcgccgcccagctccacgagcgatttatggacgccatcacgcccgccgggaccgtcatcacgcttctgggtctgacccccgaaggccatcgcgtcgccgttcacgtctacggcacgcggcagtacttttacatgaacaaggcggaggtggatcggcacctgcagtgccgtgccccgcgcgatctctgcgagcgcctggcggcggccctgcgcgagtcgccgggggcgtcgttccgcggcatctccgcggaccacttcgaggcggaggtggtggagcgcgccgacgtgtactattacgaaacgcgcccgaccctgtactaccgcgtcttcgtgcgaagcgggcgcgcgctggcctacctgtgcgacaacttttgccccgcgatcaggaagtacgaggggggcgtcgacgccaccacccggtttatcctggacaacccggggtttgtcaccttcggctggtaccgcctcaagcccggccgcgggaacgcgccggcccaaccgcgccccccgacggcgttcggaacctcgagcgacgtcgagtttaactgcacggcggacaacctggccgtcgagggggccatgtgtgacctgccggcctacaagctcatgtgcttcgatatcgaatgcaaggccgggggggaggacgagctggcctttccggtcgcggaacgcccggaagacctcgtcatccagatctcctgtctgctctacgacctgtccaccaccgccctcgagcacatcctcctgttttcgctcggatcctgcgacctccccgagtcccacctcagcgatctcgcctccaggggcctgccggcccccgtcgtcctggagtttgacagcgaattcgagatgctgctggccttcatgaccttcgtcaagcagtacggccccgagttcgtgaccgggtacaacatcatcaacttcgactggcccttcgtcctgaccaagctgacggagatctacaaggtcccgctcgacgggtacgggcgcatgaacggccggggtgtgttccgcgtgtgggacatcggccagagccactttcagaagcgcagcaagatcaaggtgaacgggatggtgaacatcgacatgtacggcatcatcaccgacaaggtcaaactctccagctacaagctgaacgccgtcgccgaggccgtcttgaaggacaagaagaaggatctgagctaccgcgacatccccgcctactacgcctccgggcccgcgcagcgcggggtgatcggcgagtattgtgtgcaggactcgctgctggtcgggcagctgttcttcaagtttctgccgcacctggagctttccgccgtcgcgcgcctggcgggcatcaacatcacccgcaccatctacgacggccagcagatccgcgtcttcacgtgcctcctgcgccttgcgggccagaagggcttcatcctgccggacacccaggggcggtttcggggcctcgacaaggaggcgcccaagcgcccggccgtgcctcggggggaaggggagcggccgggggacgggaacggggacgaggataaggacgacgacgaggacggggacgaggacggggacgagcgcgaggaggtcgcgcgcgagaccgggggccggcacgttgggtaccagggggcccgggtcctcgaccccacctccgggtttcacgtcgaccccgtggtggtgtttgactttgccagcctgtaccccagcatcatccaggcccacaacctgtgcttcagtacgctctccctgcggcccgaggccgtcgcgcacctggaggcggaccgggactacctggagatcgaggtggggggccgacggctgttcttcgtgaaggcccacgtacgcgagagcctgctgagcatcctgctgcgcgactggctggccatgcgaaagcagatccgctcgcggatcccccagagcacccccgaggaggccgtcctcctcgacaagcaacaggccgccatcaaggtggtgtgcaactcggtgtacgggttcaccggggtgcagcacggtcttctgccctgcctgcacgtggccgccaccgtgacgaccatcggccgcgagatgctcctcgcgacgcgcgcgtacgtgcacgcgcgctgggcggagttcgatcagctgctggccgactttccggaggcggccggcatgcgcgcccccggtccgtactccatgcgcatcatctacggggacacggactccattttcgttttgtgccgcggcctcacggccgcgggcctggtggccatgggcgacaagatggcgagccacatctcgcgcgcgctgttcctccccccgatcaagctcgagtgcgaaaaaacgttcaccaagctgctgctcatcgccaagaaaaagtacatcggcgtcatctgcgggggcaagatgctcatcaagggcgtggatctggtgcgcaaaaacaactgcgcgtttatcaaccgcacctccagggccctggtcgacctgctgttttacgacgataccgtatccggagcggccgccgcgttagccgagcgccccgcagaggagtggctggcgcgacccctgcccgagggactgcaggcgttcggggccgtcctcgtagacgcccatcggcgcatcaccgacccggagagggacatccaggactttgtcctcaccgccgaactgagcagacacccgcgcgcgtacaccaacaagcgcctggcccacctgacggtgtattacaagctcatggcccgccgcgcgcaggtcccgtccatcaaggaccggatcccgtacgtgatcgtggcccagacccgcgaggtagaggagacggtcgcgcggctggccgccctccgcgagctagacgccgccgccccaggggacgagcccgcccccccagcggccctgccctccccggccaagcgcccccgggagacgccgtcgcatgccgaccccccgggaggcgcgtccaagccccgcaagctgctggtgtccgagctggcggaggatcccgggtacgccatcgcccggggcgttccgctcaacacggactattacttctcgcacctgctgggggcggcctgcgtgacgttcaaggccctgtttggaaataacgccaagatcaccgagagtctgttaaagaggtttattcccgagacgtggcaccccccggacgacgtggccgcgcggctcagggccgcggggttcgggccggcgggggccggcgctacggcggaggaaactcgtcgaatgttgcatagagcctttgatactctagcatgagccccccgtcgaagctgatgtcccgcatcttgcaataaatgtctgcggccgacacggtcggaatttccgcgtccgctggtttctctgcgttgcgtctgaccacgagcacaaacgtgctctgccacacgtgggcggcgaaccggtagccggggcacgcggtcagcatccgatcgatgagccggtagtgcaggtgggccgacgtgccggggaagatgacgtacagcatgtggcccccgtacgtggggtccgggtaaaaaagaaaccgggggtcgcacgccccccctccgcgcaggatcgtgtgcacgaaaaagagctcgggctggccgagcgtatcggccaggaggtcctggaggggggtgctgtggcggtcggccagcacgaccagggaggccagaaaggtgcggtgctcaaagatcgtattgatctgctgcacgaaggccaggatgagggcctcgcggctgacggtggccagccgcccgtcgcccgcgctgcacgcggggcagcagcccccgatccccaggtagtagcccatgcccgagagggtcaggcagttgtcggccacggtctggtccaggctgaaggggagcgacacgggggtcgtcttcaccaggggcacggagagcgagcgcacgatggcgatctcctcggagggcgtctgggcgagggcggcgaagaagccgcggtagcgacggcgctcgtgcaggcagagctccagcctgcgcgcgtgcgacggcaggctcttgcgggaggcccggcgctccacgccggggttcccggcggcggaaaagcgcgaccgccgccgggtcttgtcgcggccgggcccgggccgggagccggagcgacggggggcgatgtcatacataggtacagagggtgtgctccagggacaggagagagatcgagtgtcgtctgagcagcgcgccggcctcgcggacaaatgtggccagcgcggtgggcttcggcacaaatacctggtacgtcttgaaggtgtagatgagggcccgcagggctatacagacccgcccctcgaactcgttgccgcaggccaacttggccttgtgaagctgcagctcgtcgcgatggtcggcgcgggggtggccaaacaggacccaggggtcgacttccatctccgtgatggcgcacatcggatcgcagaacatgtgcttgaagatggcctcggggcccgcggcccgaagcaggctcacgaaccggcccccgtccccgggctgcgcctcggggtccgcctcgagctggtccacgaccggcactatgcagtcgaagaggctggtgttgttctccgagtagcggacgacggacgccctcaggcgtcgcatggccagccagtaggcccgcaccagcaacagattgcacagcaggcattccccgccggtgcgcccgcgcccccggccgtgcttcagcacggtggccatcagcgggcccaggtccaggtcgggctggggctggggctcggcgaactgcgcaaaacgcggggccgcgtcgcgcatgcgcgccccgcggtgcgcttcccaggactcgctgaccgcggcgcggcgggcgtccgcggcggcgcgcagccggggccccgactcccagacggcgggggtgccggcgagcagcagcaggatcaggtcggcgtacgcccacgtctccggctcacccccctgcgccagcgccccggcggcggcctcgaactccccgttgcgggcggcggcgcgcgtgcagcagctgtctccgcccccgcgcttgccctcggtgcagtcgagcaggcgggcgcagtccttccagttcatcagggcggtggtgagggagggttgcgttcccgagcccccgcccgcccccgcccccgccccgtcatcgcccccggaggccagggtcccgatgagggcccgggttgcggactgcgcgaggaaggaatagttggagtactgcaccttggcggcgcccggggagggcgtcggcctgggttgcttctgggcgtggcgcccgggcaccccgccgtcggtccggaagcagcagtggagaaagaaatgccggtggatgtcgttgatggtcagggcgaagcgcgcgaaggagccgacaagggtcgccttcttggtgcgcaggaagtggtggtccatgacgtagacgaactcgaaggcggccacgaagatgctcgcggcgcagtggggcgcgcccaggcacttggcgcagaggaacgcgtaatcggccacccactggggcgagaggcggtaggcctgcttgtacagctcgatggtgcggcagaccagacaggggcggtccagcgcgaaggtgtcgacggacgccgcggcgaagggccccgtgtccaagagtccctctgccgtggggtctgcgggcgggccgcgggcggaccccggcccccgcccccccgaagcctcgcgcgcggccccgcgcggccgcgggggggcgggcgcgacgtcgctctccacgtcctcgtcgagcgcgctcgcgggcggcacgcctaccacgtgacaggccgccaggagctcggcgcacagggcctcgttaagagccagaaggtcgggatcgaaggccacatacggacgctcgaacgcgccctccttccagctgctgcccggcgactcttcgcgcacggcggcgctcgacggcacccccggggcggacgtcgccatggccggtcgagcggggcgcacgcgtccgcgaacgttacgggacgcgatccccgactgcgcgctgcggtcccagaccctggaaagtctagacgcgcgctacgtctcgcgagacggcgcgggggacgcggccgtctggttcgaggacatgacccccgccgaactagaggttatattcccgaccacggacgccaagctgaactacctctcgcggacgcagcggctggcctccctcctgacgtacgccgggcctataaaagcgcccgacggccccgccgccccacatacgcaggacaccgcgtgcgtgcacggcgagctgctcgcccgaaagcgcgaacggttcgcggcggtcattaaccggttcctggacctgcaccagatcctgcggggctgacgcgcgcttcggcggggcaccggcaccgggaccgacttgttttacataacagtagggggtgggggaacgcgcacccttgcccggtcgcgatggcggggatggggaagccctacggcggccgcccgggggacgcgttcgagggtctcgttcagcgcatcaggctcattgttcccgccacgctgcgcggcgggggtggggagtcgggcccctactcgccatccaacccgccctcgagatgtgccttccagttccacggccaggatgggtccgacgaggccttcccgatcgagtacgtcctgcggctcatgaacgactgggccgatgtgccctgcaacccctacctgcgcgtgcagaacaccggcgtttcggtgctgtttcaggggttttttaaccggccccacggcgccccggggggcgcgatcacggcggagcagaccaacgtgattctgcactccaccgagacgacgggactgtccctcggagacctggacgacgtcaaggggcgcctcggcctggacgcccggccgatgatggccagcatgtggatcagctgctttgtgcgcatgccccgggtgcagctcgcgtttcggttcatgggccccgaggacgccgttcgcacgcggcggatcctgtgtcgcgccgccgagcaggccctcgcccgtcgccgccggtccaggcggtcccaggatgactacggggcggtggtggtggcggcggcgcaccactcttccggagcgcccgggccgggggtcgccgcctcgggcccgccagcgccgcccggacggggaccggcccgtccgtggcatcaggccgtgcagttgttccgggccccgcgtccgggccccccggcgcttctgttgctggcggcggggctgtttctgggggccgctatctggtgggcggttggcgcgcgcctatgaaagggggcgagccaccgtcccgcccgccagtgcatcccagacgcccgcgagccgcacatcccctccgctcccgcctccggcccgattcttacggcgcgacccaaggtcccgatggccgccccgcagtttcaccgccccagcaccattaccgccgacaacgtccgggcgctcggcatgcgcgggctcgtgttggccaccaacaacgctcagttcatcatggataacagctacccgcatccgcacggaacgcagggtgcggtgcgagagtttcttcgcgggcaggccgcggcgctgacggacctcggggtgacccacgccaacaacacgttcgccccgcagcctatgttcgcgggcgacgccgcggccgaatggctgcggccctcgttcggtcttaagcgcacgtattccccctttgtcgttcgcgaccccaagacccccagcaccccgtgagtcctcggcgggtccctccgcggccgtctctcgttgcccccctttcccccttcccgggtggttcaataaaaaacaccaacatacgatattcgcgtttgatacgtttattggggggggtgtagggcccaacgatcggcgattaacaacaccaaacaatcgagcgcgtctaacccagtaacatgcgcacgtgatgtaggctggtcagcacggcgttgctgcgctgaaacagcgccctgcgggtccgctgcagctgttgttgtatgcggcggcatgcgcggatcaaaaccgccagggcgctacgaccggtgcttcgtacgtagcgtcgcgacaagacggcatttgcctgtacgggcaaggggccaaattgcgagtgtggtgactggaggtggtcggcggccaatgggccgggtggttcgtcggcggggggcaagtgcggttccggtgggagggggtcgagcgcctcggtatcatccgagtccgagaaacgcagggagtctgcgtcggagtgttcatcatcggaggagatgtgcagcgtctgaagcagcgatgcgggtgggggcgcggagtcgacgtgaagcgcgagagaggaagcccacgaagtcacagcggacactgggaggtgggtgtttgtatgtgtgggagactcgggcgtcgggaccgagtctcggctctggggtgtaagcgtccgagttacgggcggcaggggcggctggggcaggggcggctggggcaggggcggctggggcaggggcggctggggcaggggcggctggggcaggggcggctggggcaggggcggctggggcaggggcggctggggcaggggcggctggggcaggggcggctggggcaggggcggctggggcaccgagcgcgcgcggatgcgcgtccgcgcggcgggtttggtcgcgggtgactggggtggggggcggcgggcaaccgggcctccgggcacgacccaaccgcacaaaggctcgctcggggcaaccgggcctggggccaaaggcggggggctggtctggacggcggaggtcgggggggcaaggcccggagaaggcggcactgccgccgctgcggcggaaaccgcggccgcgtggtcggctgggtcccggggagaggggagggagttcaacgaggccgagagcgaggcgaccgcggggcgcgtgaggcgccggggtgggccggccgcggggccccgggggggtgtcggcgagggacccgctgttgtctggcggcggccgcggcggcggtcgcccccggggacgaccgctccttcggcgggcggaggcgggatgggcgcgagcgtgggggcgggaaaggccccgcgagccgaggcggggccgggcggaaggggcaaagcagaaacccaagccgggggcgcggactccggggtgggcggctggtcgggaggacgcgcggaagcggcgaccggggcgaccggggcggggagtgccggcggacgccacccctcggggggggcggaggcccggggcgcgcgcgatttggcacgcgtccggcgggacctgcgcacgcgcggcacggcggcggagaaagcggcggcagagccggaaaaggccgggggaggaagcgcggcatccgcggggggactcggtgtgggtggcgagggccgtgggtcgtcgcgaggggccacgggcacgcgccccgtgttttgttgaggcgggacactcggtcgtgtttcgcgagccgtagctgccggcccgatgggccgcggtgcgtactgggacgtggggacggactgatcggtggcgggggggggaagaagggccggggccggattgggcgtggggccgccggcgtcgtcggacgccagctcctccaggccgtggatccaggcccacatgcgaggggggacgggctcgccggtggtggcgtcggtgaggagagtgggggcgaggacccccgggtccgcctgccgtgcggggggggcagcggggtcctcgggacccgatccgccatccccccccgcaaggtcccgcgggtcgcgggcggcggtcggggcagagggacctgcctcgtcggcgagggggcgctggtaaaccgggtgtcccgggaacagctcccccgtcaggagggaggcgtcgaagggccgcccgaggatggcccgcgcgaagaaggggtccgcgtcggcggcgctcgccgcgagaacgtcccccgcggtagccacaaacggaagctcctcggtggcctcgctgcccacaaaccgcacgtcaggggggccggggggctccggggcttcccacaagaccgcgaccggggtcatggagatgtccacgaggaccaggcacgggggcccgtcggcgagagggcgctcggcgatgagcgccgacaggcgcgggagctgcgccgccagacacgcgttttcgatcgggttgagatcggtgtggaggaggccgacggcccacgtctcgatgtcggacgacacgacgtcgcgcagggcggcgtccggcccgccggggcgcgagtcgaagagcgtcaggcacagttccagttccgactcgcgggagaaggccgtggtgttgcggagcgccaccacgacgggcgcgccgaggagcaccgcggccagaaccaggtccatggccgtaacgcgcgcggcgggggtgcggtgggtcgcggcggccagcacggccacgtgctggcccgtgggtcggtagagggcgtggggggcctcggggagggacgcctcgcgcccccccgccgggccgagcgtctggccagactccaggcgtgcggccaggagggcgtcgaagctgtcgtactcggtgtagtcgtcgggaaacatgcaggtccacagcgcggccaaagcggcgctcggcagacacatgcgcccgaggacgctcaccgccgccagggcctgggccggactgagcttcccgagcgccgggacgtcccggcgctgggtcccgagctccaaggccgagcgccagggcgccagcgggtcggtttcggacagcttgccccggcgccagtcggccagccgcgtgccgaacaggaggccccgggtcggggggcctccgtccaaaaacgtcggcaacacgcggatgcgggcgtcgggatgcggggtcaggcgctggacgaacagcatggactccgctgcgtcctcgaacgcgcgttcgagggtgaggtgcatgtactcgtgctggcgaacgaggtccaggcgccagaagttgtagatgtgttccggaacgccggccaccagcgcgaccagcacgtcgttctcgttgaaggcgacgcagtggcgctgggacccccgggggcccggcggcggacgcggcgccgccgctccggacgcccagcccagctgggcccagcgacacccaaactcgcgcgtgagggtggtggcgacgagggcgacgtacagctcggccgccgcgtccatcgaggcgccccacgtcgcctggcgatggcgcacgaagcgaccgaacagctgaaagttggcggcctgggcgtcgctgagggccagctggagccggttcacgacggtcagcacgtacatggccgtgaccgtcggggccgattcgaggacgtccgtcggaagcgggggccgcacgcaggccgcctcgggacgcatcagcagcgcgccgagtttgtcggtgacggccgggaagcatagcgcgtactgcagcggcgttccgtccggggccaaaaagctggtggcgaacggcagatccagagcgctgacggcctcacgcagcaccaggggccccgggtctccgccggcgcgcagatacgcctcgccccggcggcgcagcagctgcgggtcgacctcgtggccctcgggggaagaagaggcccgggcgcgggcgtcgagggcgcgaagatcaacgagcaggggcgcgggcgcggactccgcgcccgcgcccgtctggccgccggccctggcgtacgcgctatataagcccatgcggtattggatgagttcccgcgcgccccggaactcctccaccgcccacggggccaggtccgcggccgccgcgtcgaactccgccagcaggccccccagggcgtcaaagttcatctcccagggcaccctgcgcaccacctcatcccgcagccgggcgcacagggcggtgtgcttggtgacgcgcgcgcccagctcctccacggcctccgcgcgctcggcgcccttggcgcccaggacgccctggtacctggcggaaaggcgctcgtaggccggctgggcccgcagccccgacaccgtgttggtggtgtcctgcagggcgcgcagctgctcgtgcatggcgcggaacccctcgggggacttccaggcgcccccccggacgcggccaaagcgaccccagacctcgtcccactccgcctcggcctcctccagggacctccgcagggcgtcgacgcggcgccgagtatcaaagagcgcccccaggcggccggcgtgccgcgccagggggccggggccgtcgccgcgggcggcgcttagcgggtgcgtctcgaaggtgcgctgggcgtgctctagccagataaccgcgggcacgtcgagctcgcgcgttttctcggtctgatccaacagaacctcgacctggtcggcgatctccgccaccgagcgcgcctggtcgagcgtcttggccacggtcgccgggacggcgaccaccttcagcatggtcttgaggttggccaggccctcggcctcgatctgggcccggcgctcgcgcgcggccagcgcctcccgcaggcccgccatgacccgctcggtggcctccgcgcgctgctgtttggcgcgcaccactgcgtccttggtctcggccgtgtcctgccgggtcacgaaggcgacatactcggcgtacgccgtgttcttcacggggctctggtccacgcgctccaacgccgccgcgcacgcgaccagcgcgtcctcgctgggacacggcagggtgaccccggtccggaccagctccgcggtggcctccgggtcattccgggccgcggatatctgctccgcggcggccgccaggtccaggggcacgccgccgagcgcccggtgcacgtcggcccggatggcgtccaggcgatcgcggagctccacgtagtcggcgtagccatgttggaagaacggcacgtaccggcgcaggccgggcacgctcgtcatgtcgtccgccaggcgccccacggcctcgtggtagtcgataaacccgtcgcccgcctgggccatttccaggagcccctccgcgatgcgcagcagccgcgccaggggctcggcgtcgacccgaaacatgtcggcgtaggtttcggcggcggcgtggaacgccgcgctccagccgaggcggtggatggcggcgagcggggggagcatggggtggcgctggttctcgggggtgtaggggttaaacgcgaaggccgtatccagggcgagggtgaccgcctcggcgttggccgcgagcgcctgctcggcgcgcttgcggaagtcccgggggttgtagccgtgcgtgcccgccagcgcctgcaggcggcgcagctcgaccacgtcgaactcggcgcggttctcgacgcggtccagcgccgcctcgacgccggcggcccagcgctcgctgctgccccgggcgcgctgggccgccatcttcgccgtcaggtcggcgacggcggcctcaagttcgtcggcgcggcgtcgcgtggcgccgatgaccttgcccagctcctgcagggcgcgcccgctgggggaatggtccccggccgtcccttcggcgtgcagcaggcccccgaacccagcctcgtgccccgcgaggctttcccgagcagcggtcgtcgcgcgggccgcggcatcgatgagggcggcatggtccccctccggctgggcgcaggcccggcgcgcctggactaccaggtcggcggccgccgaccccagggtcgtgagctcgtcgatggccccccgcgcctccagggccagccgagtcgcctttacataccccgcggcgctatcggccagcaccgcgaggaaggacaggggcgaggccgggtcgcgggcggccgcgcccagggccgacaccgcgtccgccagggcgccatgcgcccgcacggccgcgtccaccgtcgccgcgggacttgccgtcgcgacggcggcgctcccggcgttgatggcgtttgacacggctttggcgattgtgggggcgtgatcggaaaagaactgcacgaggaccggcgtctcgggggcgtcggcgaacagggtcttcagcaccaccacgaaggcgggatgcaggccggccagagccgtcgcggtatccggggtcgggtgttccagggcctcccggtactgccccagcagcccccacaggtccgcccgcagcgccgccgtgacttccgggggggggccccggacggcatcggccaggtcggtccaccccgcgggcagggaggcccgcagggtcgccagcacggccggacacgcctttagccccacaaagtccgggaggggccgcaggaccccttggagtttgtgcaggaacttctcccgggcgtcgtgggccaccttggcgcgctcccgcgcgtcgttgagcatcgcctccagggcgtgggcgcgctcccgaagccgggagcgcgcctccggagcgagctccgccgtcatcttggccgcctccatggccctcgcctgccgcagcgcgtcttcggccatgcgcgtggcctcgggggacagcccgcccccgtcgacgtacggcgcggggccggtcgccgggacgaaggccgcgtcgctgtccagctgctgcgcgagcgccgcgtcgagggcgtcgaagcgctgcagttcggccagccccgagctgcgccgcgcctgctggtcgttgatgccgtggatgctgcgcgccagctcttccaggggcttgcgttcgatgagcccctgggtcgcggcgtcggtcaggaccgagagccaggccgccaggtcctcgggggcatctaggggctggccccgctggagcaggtcccgcagcaggatggcctgggggctggtggcgagggggggcgggggggggagcgcggcgcgctgagcgacgtcccgcgtgtgttggtcaaaggccggtagcgattccagcaactggaccatgggcacgaccgcggccgaggccacgtgaaaccgacagtcgtggctgtcgctggcctgcagggccttcgcgctgtatacggctccccggtggaagtactccttgaccgcgctctcgatcgcccggcgggcctggatccgcacgtcctccagccgcgcctggatggcctcggggcccagggcgggcgggcacggggccctgccgccggcgcccggggcggcgggcacgggcatcacggtcaggggcccggcgcgctgcgagaccgagtcgaccccgcgggcgagggcgtctaaggcctcgcgcatctcgcgggcctccgcctcgacccgcatctcttcgccccgggcaaactgggccagcgcctggatccgatggagaagcggctccgggtgcgtcggggtggcgggggcgaacagggtgttcgggtgggcgcgcgagcgctccaggagccactctccgaggcgtgcgtacagattggccggcggggcggcgcgcagctgcagatccaggtccgcgaggtccccgtaaaaggcgtccgtctcccgaataacgtccctggcgaccaggaccagcttagcgagggccaggcgcccgatctgcgaattttcgtccagcacgtgctggatgaggggccggtgggcggccacgtccgccaggctcatgcgcgtggacgccaggaagtccccgacggccgttttgcggggcagcatgcgcagggtgaagtccagcagggccgcggccgggccggccaccccggcctgcgtatgcgtgcgggccccgttctcgatcaaaaaggcgaggacgcgctcaaagaagaagatgacgcagagctccaacagccccgggtgcgccgggtacggcgaccgcagggcgttgatggtgagctgcgaacacgcggccacctcgcgggccagggcggcatcgcgcgccgcgagccggaccgccgtggcggccacattggggtggacctcgaacagctgcgccaggtcggcgccggggggctccggggggcggcgggcccccagcgtctcgagcacggacggcgacgacgggctcgcgggcccgtcgtcgccgccgccctgcccggactgcgggggggtatccggtgcgggagggaccgtggcggctatgggcgtcggggaggaggcggggacctcggcggcgacgggggccttcttcttgggcgcggacttcttcttggccttggcgggcggggccttgggggcgggcctctcgcccgaggtcagatcctccacgctggacggtggggtccaggtgggccggcggcgcttgggcaagccggtagaatagcgcgcccggtggcgacccaccggcactgcccccacctccaggacccgcaggtcctcggcttcttcggccgcgtccccggcgggtgtctgcgggggcggggcggcgtgcggtggacccgaggccgcggcgtccggggccgagggcttcgcgggcggggtcccctccagggctgctgcccacacatcatcgggggggcggtttgggtgccccgcctgcggtgtgtcgggtgggcccgaggccccccggggggcctcggggggccggtcggccccaggggtctggacgtgggtgggcgcggggagcgcggggacgaccgggcccgagccttctccgtcccccctggggaccacaccgacaaagagcgccccgagccccccgatctcgccccgcagggggtgggtgatggccacgcgccgctcgacgaacggttcgtcctgcaggtaagtctcgctggccccgtagaggtgcagggccgcggcggtcaggtccgccggcgccacggcccccgggccggagggcacaaaaaacaccatggcgcccgcccaccgcaccttggggcggtcgtgggcgtaatacgtcaggtacgggtacacgtcgcccgcccgcaccttggcgataaacgcgggcgttcccgcgggcaggccgtgcgggtcaaacagataggccgtgtcgccgtcccggtagagccccatgcccagggggccgatggtcaggagcgtgtaggacagcggccgcatggcccaggggccggcgaagaacgtgtgcgcggggcattgcgtctccagcagccccgccgtgggctccccgaagaagcccacctcgccgtacacccgcgaaaacacgcaacgcaggccgccgcgcgccgccgggtactccaggaagttggggagctcgataatggaacacatgcgcggcggcccggagcccgcggccgcgcgcgtccactcgcccccctccaccagacatccctcgatggcctccgcggacagcacgtcgcggggccccacgtcgaaaagaagactgagaaacgacagggacgagcgcatgcacgataccgacccccccggctccagatcggtcgcgaactggttccgaacaccggtgaccacgatatcgcgatccccctggcgcttcatcgtggggtgaggtagcgcggccggaatcatgtgtgccgcgcccgccacgagcggggcctgtttatgggccgggcgtcccgatgagtactgttgtttccgccgcccgaacccccccgcccatcaaccgcctgttcgtccccctaaccacacacccggtatcgcgtgtgtgtggtttcccgggaagacacatcccaccccatgaagttttgccctttttttccgtcccgcactacgccacctttccacccccccccaaaaaaacaacaaccaactcccagatggatgggtgcgataataaagctttattattgtttaaccaaaggcgagtcctacgggtgtaccggtggtgtctcctgcggcgtcatctcgtcgtcctccacgggggtgttgggccaagggaccgtctcgcggcccgccgggcgcgtcgacggcgcgcgggcctgcgtgtcctgtgggccgggtgtcgtgggttcgggggtgctaccgccggcatcttgggcctccaggtccccgggggcccccgggccggcggaaggccgaaacgccgaggcgcgaaacacgccgtcggtgacctgcaggagctcgtttattaatagccagtccatgctcagcgtagcggccagcccctggggagacaggtccacggagtccggaaccaccgtcggctgacccaggggccccaggctgtagtccccccaggcccccaggtcatgacggttcgtgagcacgacgaggtctgcggccgggctggggggcgcgtcctcggtcgcgtgggccatcacctcctgaatggctgcggtgcgctgatcggccgagctggcgaagcgcgccacgaccagcgcgcgctccgtctgcaggcccttccacgtgtcgtggagttcctgaacgaactcggccacccgctcggggcccgtggccgcgcgtgcggcctgatagccggccgagaggcgccgccagcgcgccaggaactgactcatgtaacagaacccggggacctggtcccccgacatcaactttgacgccctggcgtggatgcccgacacgatggccaggaacccgtggatttcccgccgcacgacggccagcacgttaccctcgtgcgagacctgggccgccagctcgtcgcataccccgaggtgcgccgtcgtctcggtgacgacggaccgcagccccgcgagggacgcgaccagcgcgcgcttggcgtcgtgatacatgccgcagtactggctcaccgcgtcgcccatggcctcggggcgccagggccccaggcgctcgtgggcgtctgcgaccacggcgtacaggcggtgcccgtcgctctcgaaccggcactcaaagaaggcggcgagcgtgcgcatgtgcagccgcagcagcacgatcgcgtcctccagctggcggaccagggggtcggcgcgctcggcgagctcctgcagcaccccccgggccgccagggcgtacatgctgatcagcagcaggctgctgcccacctcgggaggctgggggggaggcagctggaccgcgggccgcagctgctcgacggcccccctggcgatcacgtacagctcgcgcagcagctgctcgatgttgtcggccatctgcatcgtgggcccgacgccggcccgggtggccggttcgaggagggtgatcagcgcgcccaattttgtgcggtgcccctcgacggtggggagatagcccaggccgaagtcgcgcgcccaggccagcacccgcagggcaaactcgatggggcggggcaggtaggcagcgttgcacgtggccctcagcgcgtccccgaccaccagggccagcacgtaagggacgaaccccgggtcggcgaggacgttggggtggatgccctccagggccgggaagcggatcttggtggccgcggccaggtgaaccgagggggcgtggctaggcggcccgacggggagcagcgcggacagcggcgtggccggggtggtgggggtcaggtcccagtgggtctggccgtacacgtcgagccagatgagcgccgtctcgcgcaggaggctgggctggccggcgctgaagcggcgctcggccgtctcaaactcccccacgagcgtgcgccgcaggctcgccaggtgttccgtcggcacggccgggcccatgatgcgcgccagcgtctggctgaggacgccgcccgacaggccgaccgcctcacagagccgcccgtgcgtgtgctcgctggcgccctggatccgccggaacgttttcacgtagccggcgtagtgcccgtactcccgcgcgagcccgaacacgttcgcccccgcaagggcaatgcacccaaagagctgctggatctcgctgagcccgtggccggggggcgtccgcgcgggcacccccgccaccaaaaacccctccagggccgatatgtactgggtgcagtgcgcgggcgtgaaccccgcgtcggtaagcgtgttgatcaccacggagggcgagttgctgttctggaccaaagcccacgtctgctgcagcagcgcgaggagccgttgctgggccccggcggagggcggctcccctagctgcagcaggccggtgacggccggacggaagatggccagcgccgacgcactcagaaacggcacgtcggggtcgaagacggccgcgtccgtccgcacgcgcgccatcagcgtccccgggggcgcgcacgccgaccgcgggctgacgcggcttagggcggtcgacacgcgcacctcctcgcgactgcgaaccattttggtggcctcgaggggcgggatcatgatagccgggtcgatctcccgcaccgtgtgctgaaactgggccagcagcggcggcgggaccaccgcgccccgatcgggggtcgtcaggtagtcgtccaccagcgccagcgtaaacagggcccgcgtgaggggggtcagggcggcgtcgtcgatgcgctgtaggtgcgccgagaacagcgtcacccaattgctgaccagggccaagaaccggagaccctcttgcacgatcggggacgggaagagcaggctgtacgccggggtggtcaggttggcgccgggttgccccaggggaaccggggacatcttaagcgacatctccccgagggcctccagggaggtccgcgggttcatggccaggcagctctgggtgacggtccgccagcggtcgatccactccacggcacactggcggacgcgcaccggccccagggccgccgtggtgcgcagcccggcggcctccagcgcgtgggtcgtgtcggagccggtgatcgccaggaccgtgtccttgatgacgtccatctcccggaaggccgcctcgggggtctcggggagcgccaccgccatgcggtgcaccagcagcccggggaggttctcggccaagagcgccgtctccggaagcccgtgggcccggtgcaaggcgcacagttgctccaggagcgggtgccagcacgcccgcgcctccgccgggccgaccgccgcgcccgacaacagaaacgccgccgtggcggcgtgcagtttggccgcggacagaaacgccggctcgtccgcgctgcccgccggctcgctcgagggggagggcggccggcggaggttggtcaggctccccaacaggacctgcaacggtccgtttgggggtggagcggacgggggggtcatgccggcgggcgccgggacctggagcgcgctgtccgacatggcgaccggcgtgcgcgctcggcgacgcggcgcggagaccgcgggcccaaacgggaatgactgccgccgccctatacggaggggctaagtatcgcccggggacccttcgaaaccccgggcgtgtcgcaagtacgccgcgaaggcgcggcgtgttatacggcgcgttatgtcccggcattccgttcgtgggttcgggcccgggtgctgtcgggtgggagtgtgtgtgggggggggcggcgcgacggcggcccggaccaagtgtatcgcggccgttccgtggggcggcccaacaggccctttaaacatttgcgtatgcaccggcccagccagtcggacaccggaacccaccagaggcggaagccgccttcgcccgtgagggtgcgtgtgttttctggtggcgtgtttttcctttccgccctcctccctccccacctccaccacccccccccacaactcgcccgttggcgatcggcgggaaaaccatgaaaaccaagccactcccgacagccccgatggcgtgggccgagagtgccgtggaaaccaccaccagcccgcgcgagctcgcgggccacgccccgctccggcgcgtcctgcgcccgcccatcgctcgccgcgacggcccggtgcttttgggggacagggcccccaggaggacggccagtacgatgtggctgctggggatcgaccccgcggagtcgtctccgggaacgcgcgctacccgagacgataccgagcaggccgtggacaagatcctcaggggagcccggcgcgcgggagggctgaccgtccccggcgccccccgctatcacctgacccgccaggtaaccctgacggatctctgccaaccaaacgcggagccggccggggcgctccttttggccctgcggcaccccaccgacctcccccacctggcccgccatcgggctccgcccggccggcagaccgagcgactggccgaggcctggggccagctcctggaggcctccgccctggggtccgggcgggccgagagcggctgcgcgcgcgcgggccttgtgtcgtttaactttctggtggccgcgtgcgccgccgcctacgatgcgcgcgacgccgccgaggcggtccgggcccacatcacgaccaactacggcgggacgcgggccggggcgcggctggaccggttttccgaatgcctgcgcgccatggtccacacgcacgtgtttccccacgaggtcatgcggtttttcggggggctagtgtcgtgggtcacacaggacgagctggctagcgtcaccgccgtctgcagcggaccccaggaggccacacacaccggccacccgggcaggccccgttcggccgttaccatcccggcctgcgccttcgtggacctggacgccgagctgtgcctggggggcccctggggggcgttcctgtacttggtcttcacctaccgacagtgccgggaccaagagctctgttgcgtgtacgtggtcaagagccagctccccccgcgcggactggaggcggccctcgagcggctgttcgggcgcctccggataaccaacacgattcacggggccgaggacatgacgccccctcccccgaaccgaaacgttgactttccgctcgccgtcccggccgcgagctcgcaatccccgcggtgctcggcgagccaagtcacgaacccccagtttgtcgacaggctgtaccgctggcagccggatctgcgggggcgccctaccgcacgcacctgcacatacgccgccttcgcagagctgggtgtcatgccagacgacagcccccgctgtctgcaccgcaccgagcggtttggggcggtcggcgttccggttgtcatcctggagggcgtggtgtggcgcgcggcggggtggcgggcctgcgcgtgatcgtctattgacgacggccgcccaacccgagcgaccttcccctcccacttccccccccctacacaccaactccgccctcgccgtcttggccgtgcgcggccccgtgcgtccgtctcaataaagccaggttaaatccgtgacgtggtgtgtttggcgtgtgtctctgaaatggcggaaaccgacatgcaaatgggattcatggacatgttacacccccctgactcaggagataggcatatcctccttagattgactcagcacacgatcgcaccccacccctgtgtgccggggataaaagccaacgcgggcggtctgggttaccacaacaggtgggtgcttcggggacttgacggtcgccactctcctgcgagccctcacgtcttcgcccaccgattcctgttgcgttcctgtcggccggtgctgtcctgtcgacagattgttggcgactgcccgggtgattcgtcggccggtgcgtcctttcggtcgtaccgcccaccccgcctcccacgggcccgccgctgtttccgttcatcgcgtccgagccaccgtcaccttggttccaatggccaaccgccctgccgcatccgccctcgccggagcgcggtctccgtccgaacgacaggaaccccgggagcccgaggtcgccccccctggcggcgaccacgtgttttgcaggaaagtcagcggcgtgatggtgctttccagcgatccccccggccccgcggcctaccgcattagcgacagcagctttgttcaatgcggctccaactgcagtatgataatcgacggagacgtggcgcgcggtcatttgcgtgacctcgagggcgctacgtccaccggcgccttcgtcgcgatctcaaacgtcgcagccggcggggatggccgaaccgccgtcgtggcgctcggcggaacctcgggcccgtccgcgactacatccgtggggacccagacgtccggggagttcctccacgggaacccaaggacccccgaaccccaaggaccccaggctgtccccccgccccctcctcccccctttccatggggccacgagtgctgcgcccgtcgcgatgccaggggcggcgccgagaaggacgtcggggccgcggagtcatggtcagacggcccgtcgtccgactccgaaacggaggactcggactcctcggacgaggatacgggttcggagacgctgtctcgatcctcttcgatctgggccgcaggggcgactgacgacgatgacagcgactccgactcgcggtcggacgactccgtgcagcccgacgttgtcgttcgtcgcagatggagcgacggccccgcccccgtggcctttcccaagccccggcgccccggcgactcccccggaaaccccggcctgggcgccggcaccgggccgggctccgcgacggacccgcgcgcgtcggccgactccgattccgcggcccacgccgccgcaccccaggcggacgtggcgccggttctggacagccagcccactgtgggaacggaccccggctacccagtccccctagaactcacgcccgagaacgcggaggcggtggcgcggtttctgggggacgccgtcgaccgcgagcccgcgctcatgctggagtacttctgtcggtgcgcccgcgaggagagcaagcgcgtgcccccacgaaccttcggcagcgccccccgcctcacggaggacgactttgggctcctgaactacgcgctcgctgagatgcgacgcctgtgcctggaccttcccccggtcccccccaacgcatacacgccctatcatctgagggagtatgcgacgcggctggttaacgggttcaaacccctggtgcggcggtccgcccgcctgtatcgcatcctgggggttctggtccacctgcgcatccgtacccgggaggcctcctttgaggaatggatgcgctccaaggaggtggacctggacttcgggctgacggaaaggcttcgcgaacacgaggcccagctaatgatcctggcccaggccctgaacccctacgactgtctgatccacagcaccccgaacacgctcgtcgagcgggggctgcagtcggcgctgaagtacgaagagttttacctcaagcgcttcggcgggcactacatggagtccgtcttccagatgtacacccgcatcgccgggtttctggcgtgccgggcgacccgcggcatgcgccacatcgccctggggcgacaggggtcgtggtgggaaatgttcaagttctttttccaccgcctctacgaccaccagatcgtgccgtccacccccgccatgctgaacctcggaacccgcaactactacacgtccagctgctacctggtaaacccccaggccaccactaaccaggccaccctccgggccatcaccggcaacgtgagcgccatcctcgcccgcaacgggggcatcgggctgtgcatgcaggcgttcaacgacgccagccccggcaccgccagcatcatgccggccctgaaggtcctcgactccctggtggcggcgcacaacaaacagagcacgcgccccaccggggcgtgcgtgtacctggaaccctggcacagcgacgttcgggccgtgctcagaatgaagggcgtcctcgccggcgaggaggcccagcgctgcgacaacatcttcagcgccctctggatgccggacctgttcttcaagcgcctgatccgccacctcgacggcgagaaaaacgtcacctggtccctgttcgaccgggacaccagcatgtcgctcgccgactttcacggcgaggagttcgagaagctgtacgagcacctcgaggccatggggttcggcgaaacgatccccatccaggacctggcgtacgccatcgtgcgcagcgcggccaccaccggaagccccttcatcatgtttaaggacgcggtaaaccgccactacatctacgacacgcaaggggcggccatcgccggctccaacctctgcaccgagatcgtccacccggcctccaagcgatccagtggggtctgcaacctgggaagcgtgaatctggcccgatgcgtctccaggcagacgtttgactttgggcggctccgcgacgccgtgcaggcgtgcgtgctgatggtgaacatcatgatcgacagcacgctacaacccacgccccagtgcacccgcggcaacgacaacctgcggtccatgggcattggcatgcagggcctgcacacggcgtgcctcaagatgggcctggatctggagtcggccgagttccgggacctgaacacacacatcgccgaggtgatgctgctcgcggccatgaagaccagtaacgcgctgtgcgttcgcggggcgcgtcccttcagccactttaagcgcagcatgtaccgggccggccgctttcactgggagcgcttttcgaacgccagcccgcggtacgagggcgagtgggagatgctacgccagagcatgatgaaacacggcctgcgcaacagccagttcatcgcgctcatgcccaccgccgcctcggcccagatctcggacgtcagcgagggctttgcccccctgttcaccaacctgttcagcaaggtgaccagggacggcgagacgctgcgccccaacacgctcttgctgaaggaactcgagcgcacgttcggcgggaagcggctcctggacgcgatggacgggctcgaggccaagcagtggtctgtggcccaggccctgccttgcctggaccccgcccaccccctccggcggttcaagacggccttcgactacgaccaggaactgctgatcgacctgtgtgcagaccgcgccccctatgttgatcacagccaatccatgactctgtatgtcacagagaaggcggacgggacgctccccgcctccaccctggtccgccttctcgtccacgcatataagcgcggcctgaagacggggatgtactactgcaaggttcgcaaggcgaccaacagcggggtgttcgccggcgacgacaacatcgtctgcacaagctgcgcgctgtaagcaacagcgctccgatcggggtcaggcgtcgctctcggtcccgcatatcgccatggatcccgccgtctcccccgcgagcaccgaccccctagatacccacgcgtcgggggccggggcggccccgattccggtgtgccccacccccgagcggtacttctacacctcccagtgccccgacatcaaccaccttcgctccctcagcatcctgaaccgctggctggagaccgagctcgtgttcgtgggggacgaggaggacgtctccaagctctccgagggcgagctcggcttctaccgctttctgtttgccttcctgtcggccgcggacgacctggtgacggaaaacctgggcggcctctccggcctcttcgaacagaaggacattcttcactactacgtggagcaggaatgcatcgaggtcgtccactcgcgcgtctacaacatcatccagctggtgctctttcacaacaacgaccaggcgcgccgcgcctatgtggcccgcaccatcaaccacccggccattcgcgtcaaggtggactggctggaggcgcgggtgcgggaatgcgactcgatcccggagaagttcatcctcatgatcctcatcgagggcgtcttttttgccgcctcgttcgccgccatcgcgtacctgcgcaccaacaacctcctgcgggtcacctgccagtcgaacgacctcatcagccgcgacgaggccgtgcatacgacagcctcgtgctacatctacaacaactacctcgggggccacgccaagcccgaggcggcgcgcgtgtaccggctgtttcgggaggcggtggatatcgagatcgggttcatccgatcccaggccccgacggacagctctatcctgagtccgggggccctggcggccatcgagaactacgtgcgattcagcgcggatcgcctgctgggcctgatccatatgcagcccctgtattccgcccccgcccccgacgccagctttcccctcagcctcatgtccaccgacaaacacaccaacttcttcgagtgccgcagcacctcgtacgccggggccgtcgtcaacgatctgtgagggtctgggcgcccttgtagcgatgtctaaccgaaataaaggggtcgaaacggactgttgggtctccggtgtgattattacgcaggggaggggggtggcggctggggaaagggaaggaacgcccgaaaccagagaaaaggaccaaaagggaaacgcgtccaaccgataaatcaagcgccgaccagaaccccgagatgcataataacgattttattactcttattattaacaggtcgggcatcgggaggggatgggggcgcgcgtttcctccgttccggctactcgtcccagaatttagccaggacgtccttgtaaaacgcgggcgggggcgcgtgggcccacagctgcgccagaaaccggtcggcgatgtccggggcggtgatatgccgagtcacgatggagcgcgctaaatcttcgtcgcggaggtcctgatagatgggcagtctttttagaagagtccagggtccccgctccttggggctgataagcgatatgacgtacttgacgtatctgtgctccaccagctcggcgatggtcatcggatcgggcagccagtccagggcctccggggcgtcgtggatgacgtggcggcgacgtccggcgacatagccgcggtgttccgcgacccgctgcgcgttggggacctgcacgagctcgggcggggtgagtatctccgaggaggacgaccgggcgccgtcgcgcggcccaccggcgacgtccgggggctggaggggggggtcttcttcgtagtcgtcctcgcccgcgatctgttgggccagaatttcggtccacgagatgcgcgtctcgaggccgaccggggccgcggtcagcgtaggcatgctctccagggagcgcgagttggcgcgctcccgccgggccgcccggcgggcctgggatcggctcggggcggtccagtgacactcgcgcagcacgtcctcgacggacgcgtaggtgttattggggtgcaggtctgtgtggcagcggacgaacagcgccaggaactgcgggtaactcatcttgaagtactgcagcaggtcgcggcagtgaatcgtcggaatgtagccggtgctgatgtccaacacgatatcgcagcccatcagcaggagatcggtatccgtggtatgcacgtacgcgaccgtgttggtatgatagaggttcgcgcaggcgtcgtcggcctccagctgacccgagttgatgtaggcgtaccccagcgcccgcagaacgcggatacagaacaggtgagccaggcgcagggccggcttcgagggcgcgcccgagggggccgccgggcctgggccggcggcccgcgttccccggtcccccggggcgaaggcgtgcccgcggcggcgcatgttggaaaaggcgaaactgggcctggagtcggtgatgggggaaggcggcggcgaggcgtctacgtcactggcctcctcgtccgtgcggcactgggccgtcgtgcgggccaggatcgccttggccccgaacacaaccggctcggtacactcgaccccgcgatcggtcacgaagatggggaacagggacttttgggtaaacacccgtaacatactacagagacagtgtagcgtgattgcctcgcggtcgtaacttgggtagcggcgctgatatttaaccaccagggtatacatgacattccacaggtccacggcgatgggggtaaagtagccctccggggcccggaggccccggcgcttcaccagatggtgagtctgggcaaacttcatcatgccaaacagacccattccggcacgattgtaggtgcggataggtctctctacagagctgtataggtgtgacggtccgggacacccaagcccgccgcccctgtgtacagtggctgcggcgacgaccccgctccaacaagacgctatcccgggaaaggcacgctctttataattcttttttatttcccatctacgtgcggattggtgcaaccgccggcgcgcgccggtgcaggccgaccatctctctcttccccccctccccctcccccgagccctcaaagagggtgtggcctaactagcggaaggcgtatttaaccagactagggcggcgggtccgccgtagtccttggctcgggtagccactgctctgtggctcgggtcccccggcccccctaacccccatccggtccgcgtcatccgccccctccgcctgcgacacaaacggccgcgcctccgggcccggtgacacgacgcgcctcgtctctgcggattgtcccgggagcgtcgcggcatggctcatcttcccggcggtgcggccgccgcccccctttcggaggacgcgatcccgtcgccgcgcgagcggacggaagactggccgccctgccagatagtgctgcagggcgccgagctgaacgggatcctgcaggcctttgcgccgcttcgcacgagccttttggactcgctcctggtcgtgggcgaccgaggcatccttgtacataacgcgattttcggcgagcaggtgtttctgcccctcgaccattcgcagttcagtcgctatcgatggggcggacccaccgcggcgttcctgtctctcgtggaccagaagcgatccctgctgagcgtgtttcgcgccaaccagtaccctgacctgcggcgggtggagctgacggtcacgggccaggccccgtttcgcacgctggtgcagcgcatatggacgaccgcgtccgacggagaggccgtggagcttgccagcgagacgctcatgaaacgcgagttgacgagcttcgcggtactactcccccagggcgaccccgacgtccagctgcgcctcacgaagccccagctcacgaaggtggtgaacgccgtcggggacgagaccgccaaacccaccacgttcgagctcggccccaacggcaagttttccgtgtttaacgcgcgcacctgcgtcacctttgccgcccgcgaggagggcgcgtcgtccagcaccagcgcccaggtccagattctgaccagcgcgctgaagaaggcgggccaagcggccgccaacgccaagacggtctacggggaaaacacacaccgcacattctcggtggtcgtcgacgactgcagcatgcgggcggtcctccggcggctccaggtcggcggggggaccctcaagttcttcctcacggccgacgtccccagcgtgtgtgtcaccgccaccggccccaacgcggtgtcggcggtgtttcttttaaaaccccagcgggtctgcctgaactggctcggccggagcccgggttcctcgaccgggagcttggcgtcccaggactctcgggccggcccgaccgacagccaggactcctcctccgagccggacgcgggcgaccgcggcgccccagaagaagaaggcctcgagggccaggcccgggtaccgcccgcgttcccggaaccgccgggaaccaagcggaggcaccccggggccgaagttgtccccgcggacgacgccaccaagcgcccgaagacgggcgtgcccgccgcccccacgcgagccgagtcgccccccctctccgcgagatacggacccgaggcggcggagggtggtggggacggcggccgctacgcgtgctactttcgcgacctccagaccggcgacgcgagccccagccccctctccgccttccggggtccccaaagacccccatacggctttgggttgccctgacggcaacgggtggtggccgaacgcctcaccgcgcccgggcacgcggggtgcgttgtgttaaaaaaataaataaatggggtagtgtgtcccccccccctccaaccaatatggctgtcgtgtgtggttccgggttgcgcctccgtcctttccaccccccttccccctccttttttgttttgcgtgcgcttataagagcgggcccggggcccttcgcagcttcaccgagagcgccgtcgggccccgggtgcgggatgtgtcgcggggacagccccggggtcgcgggcgggagcggcgaacactgcctcggaggggatgatggggacgacgggcgcccccgcctcgcctgcgtgggtgccatcgctcgggggttcgcgcatctctggctccaggccgccacgctgggcttcgtggggtctgtcgttctgtcgcgcggcccgtatgcggacgccatgtcgggggcgttcgtgatcgggagcaccggcctggggttcctccgcgccccccccgcgttcgcccggccgccgacgcgtgtgtgcgcgtggctgaggctggtcggcgggggagcggccgtggccctgtggagcctcggggaggccggcgcgcctccgggggttccgggcccggcgacccagtgcctggcgctcggggccgcctacgcggcgctgctggtgctggccgacgacgtccatccccttttcctcctcgccccgcggcccctgtttgtcggcaccctgggggttgtcgtcggcgggctgacgataggcggcagtgcgcgctactggtggatcgacccccgcgccgccgcggccctgacggcggcggtggtggcgggcctcgggacaaccgccgccggggacagcttttccaaggcctgtccccgccaccgccgcttttgcgtcgtctccgcggtcgagtctcccccgccccgatacgccccggaggacgccgagcggccaacagaccacggacccctgttaccgtcgacgcaccaccagcgatctccgcgggtctgcggcgacggggccgcacggcccgaaaacatctgggttcccgtggtgacctttgcgggcgcgctcgcgctggccgcctgcgccgcgcgagggtctgacgcggctccgtcaggcccggtcctgccgctgtggccccaggtgtttgtcgggggccacgcggcggcgggcctgacggagctgtgtcagaccctcgcgccccgggacctcacggacccgctgctgtttgcgtacgtcggattccaggtcgtgaaccacgggctgatgtttgtggtccccgacatcgccgtatacgcgatgctggggggcgccgtgtggatctcgctgacgcaggtgcttgggctccggcgccgccttcacaaggacccagacgccgggccctgggcggccgcgaccctgcggggcctctttttctccgtctacgcattggggtttgcggcgggggtgctggtgcggccgcggatggcggcgagccggcggtcggggtgatcgccatttcaaataaaaggcacgagttccccgaataccaccggcgtgtgatgatttcgccctaccgctccgatccccggggggaggggggaaggaaatgggggcgggggtgccgtggacgggtataaaggccaggggggcaggcgggcccatcactgttagggtgttaggttgggaggtggcacaaaaagcgacactcccgtgttgtagttgtccgcgggaggcggtggtttccggcaaccctcctcgctgcgccgggcgcgcccaccggtccttcgcgggggccggggctcttctggtcatggcccttggacgggtgggcctagccgtgggcctgtggggcctgctgtgggtgggtgtggtcgtggtgctggccaatgcctcccccggacgcacgataacggtgggcccgcgggggaacgcgagcaatgccgccccctccgcgtccccgcggaacgcatccgccccccgaaccacacccacgcccccccaaccccgcaaggcgacgaaaagtaaggcctccaccgccaaaccggccccgccccccaagaccgggcccccgaagacatcctcggagcccgtgcgatgcaaccgccacgacccgctggcccggtacggctcgcgggtgcaaatccgatgccggtttcccaactccacccgcacggagttccgcctccagatctggcgttatgccacggcgacggacgccgagatcggaacggcgcctagcttagaggaggtgatggtaaacgtgtcggccccgcccgggggccaactggtgtatgacagcgcccccaaccgaacggacccgcacgtgatctgggcggagggcgccggcccgggcgccagcccgcggctgtactcggtcgtcgggccgctgggtcggcagcggctcatcatcgaagagctgaccctggagacccagggcatgtactactgggtgtggggccggacggaccgcccgtccgcgtacgggacctgggtgcgcgttcgcgtgttccgccctccgtcgctgaccatccacccccacgcggtgctggagggccagccgtttaaggcgacgtgcacggccgccacctactacccgggcaaccgcgcggagttcgtctggttcgaggacggtcgccgggtgttcgatccggcccagatacacacgcagacgcaggagaaccccgacggcttttccaccgtctccaccgtgacctccgcggccgtcggcggccagggccccccgcgcaccttcacctgccagctgacgtggcaccgcgactccgtgtcgttctctcggcgcaacgccagcggcacggcatcggtgctgccgcggccaaccatcaccatggagtttacgggcgaccatgcggtctgcacggccggctgtgtgcccgagggggtgacgtttgcctggttcctgggggacgactcctcgccggcggagaaggtggccgtcgcgtcccagacatcgtgcgggcgccccggcaccgccacgatccgctccaccctgccggtctcgtacgagcagaccgagtacatctgccggctggcgggatacccggacggaattccggtcctagagcaccacggcagccaccagcccccgccgcgggaccccaccgagcggcaggtgatccgggcggtggagggggcggggatcggagtggctgtccttgtcgcggtggttctggccgggaccgcggtagtgtacctcacccacgcctcctcggtgcgctatcgtcggctgcggtaactccggggccgggcccggccgccggttgtcttcttttccaccccttccgtcccccgtacccaccacaccccaccccacccccccgccgtcccccgggcgttataagccgccgcactcgcttttcccaccggaaaatcctcggcccgatccgaacggcgcacgccgcgtgggctccaaacgcctccggaagagagcgccccgccccgatattcaagcccgcggtggtgctatggctttccgtgcttcgggacccgcctaccagcccctcgcccccgcggcctccccggcgcgggctcgtgttccggccgtggcctggatcggcgtcggagcgatcgtcggggcctttgcgctcgtcgccgcgttggttctcgtaccccctcggtcctcgtggggactctcgccgtgcgacagcggctggcaggaattcaacgcgggatgcgtcgcgtgggaccccacccccgtcgagcacgagcaggcggtcggcggctgcagcgcgccggccacccttatcccccgtgcggccgccaagcacctggccgctctgacacgcgtccaggcggagagatcgtcgggttactggtgggtgaacggagacggcatccggacctgtctgagactcgtcgacagcgtcagtggcatcgacgagtttttcgaggagctcgcgatccgcatatgctactacccacgaagccccggcgggtttgtccgcttcgtaacttcgatacgtaacgccctggggttgccgtgaggcgcgcgtccgacggtcccgcttctcgcctctcttcttcccccaccccacccaccgaccaacgacggcgtttggccaataccctccttttttctttttctcttcccccccccccaaaaaaaacaataaacagctaattgcgtacgacaaaccatgcggaactcgctgttttttttctctgtttgttactttttattgaaacagacatacggggaaaggggccggaaaccgagacggtggggccggcggtcgcatttttttaatggctctggtgtcggccgcgtttgagcttcgtcaacagggcgctgagggcggcgacgttcgtcgggccgtcgttggccagcgcgttggtccgggggcgggcgggcatgggcgacaggcttagtcccgggtccggggcgcgtgtggcccgccgaggggagaagagggcagacccgccccagtcgtacaggggattttccgcctcgatgtacggggagtccggggcgtctcccggcagggcggccccgccggcaagacgccggcgagggcagatgttttcgtatacccgaacccaggggatctcctcgtagacgcgccccccatcctcgcccaccgactcgtaaatggaatctgcgtcctcggagggggcgcggggggcgtggctttcggccggccaggcggcggcggcggtggtgtcggcggcgggggtggcgccaagcccgacgcccgcgggcatggcggcgtcatcgtcgggcagcagatacgtgttttccatctggtccggttcggcctccgcgtccggcccccaggtccgcaccgcgtcgtagaccccggcggcctcgcgctgagccgcgagcgggcgcgccgcggctgccggccgctgctcggggggcgcggggttgcggggcgggaggcgcgggggcgccccggccatatgcgtgtaatacgtggccggccggccggcgcagggctcgggaccccggtcggccgcgtcgacgtgcgggggctcggggaggtcctcgcggtggcgcctgcacctccgaggggccgcgggggtcgagtgggggcgagcccgggggagcggcgggggtgcgttgtcgcgccgggtccgttgtatcttgtcccggcagctcccgccgaccgcgccgcggccccccggtgggccggacgccgcgaggcgcaggatggactcgtagtggggcgacggggttccgctccgaagcaggtccggggccagggcggccccgaaccaggacttgatgctgagttccatccgggcccagctcggggcggtcatcgtggggaacaggggggcggcggtcctgcagaagcgctcctggctgtccaccgccgccgtaaggtactcgttgttcaggctgtcggaggcccagacgacatacccggtaagcgtcgcgttaattatatactgggcgtggtggtggactatggatagaacctcgacggtcgagacgatggcgtccacgatcccgtacgtgccgccgctgcgcttgccggtctcccacaggtgggccaggcgcgtcaggtggcccaggacgtcgctgaccgccgcccgcagggccatgcactgcatcgagcccgtggtgccgctgggcccgcggtccaggtggcgcgcaaacgtctccgcgggcgcctccagactcccgctgagcgccacgaaccggcgatcggcggggcccaggcggcgacacacgtacttgtccgccgtccacagcatccacgaggcccaatggtacaacacggagacgtaggccaggagctcgctcagccgcagtgcggtgtccgtgctcggccggctcgggtctgcggggcgcataaagaacatgtactgctggagcctgtgggccgcgtcgcgcaaccccgccaccgcggcggcgtacttggccgcggcggccccgctcttgaacggggcgcgcaccagcagcttcgggagcagggtgggccgcagcagcacgtgcaggctggggtcgcagtcgcccgccgggtcgtcggggatgtccaggccgctgggcacgaccgtctggaggtacttccagtactgcgctaggatggcgcggctcagctggccgcccgacagctccacctcgccgagcgcctgcttggcggccgacgcgtagtgccggatgtagtcgtagtgcgggtcgctggcgagcccgtctacgatcaggctctcggggacggtgttatggtgccgcgccgccagccggacgctgcgatcggcgccggtcagaaacgccggctgcaggtcgtcggcgcgctgccgcaggacgcccacggccgcgctgaggagcccctccggggtggggagcagacacccggcgaagatgcgccgctcggggacgcccgcgttggcgccgcggatgaggttggccggcgtcaggcaccgcgccagccgcagggagctcgcgccgcgcgcccggcgttgcatggcggagaccgttcggtcgggggccccgccggtcggaggtatgccgcgtcccgggatatagggttgctttttatggggaggcgcctatgggcgtggcgggccgcccagcccggtcgcgcgcctcccggacacgtgcgcccggagggcggcggtctcctcgtcgcccatgagcagtttccgaaactgcgccatgatgtccacgacgcggacccgcggccccagcacggactcgctattcaggggggcgggggggaaggccgccaggtcttcgagcaggaaggcggggtctgccgtcccgctcacgggcgcccggggcgccgaggacgcggggcgaaggtccacgtgttccgcggcggcgcgcacgtccgcccaaaatttggcgggggtggtccgcgcgtacaggggctgggtcgcgcggaggacgcacgcgtagcgcaggggggtgtacgtgcccacctcgggggccgtcgacccgccgtcaaacgcggccagggccacgcacgcgaccaccgtgtcggccaggcccagcagccgctgcaggatgagccccgtcgccagcacggcgcgcgcggccgccgcgtcgtccctgcgccggcgcgcgtccccgcaggccagggcgtatttcagggtaacggtcgccagggccgtgtgcagcgcgtacacggccgcgcccagcacggcgttcagcccgctggtggcgagcaggcggcgcgccgcggtgtcgcccagcgcctcgtgctcggccgccacgaccccggggctgcccaggggcagggcgcgaaacagcgcctcctgctccacgtccgcaaacgcggggtgggcggagtgcgggtgcaggcgcgcccccacgaccaccgagagccactggaccgtctgctccgccaggaccgccagcacgtccaggacgcgccccgcaaacgcggcctcccgcgggagcacgcatttgacggcgccggggttgaagcgggcgagcagagccccggtggcgatgtacgtcatgcgccccgcgtagcgggcggccacgcgacagtcgcgccccaggagcgcgcgcaccccgggccagtacagcagggaccccagcgaactgcgaaagaccgcggcgtcggggccggggtgggggggcgcggcccctcccgcgctgagcagcggcacggcggcggcccccacgggccgcaacgccgtgaggctcgcgaactgccgtcggagctcggccgccctgtcgtcgagctccgagccgcgcccctccgtgtgcaggcgcgtcccgcagacccacccgttgatcgccacccgcacgatggcgtccaccagaaaacccatcgcgcgggaggggctggtttttgcccgccgatccgtcaggtcgaggatcgcgtcgcccgtgacgtaccaggccagcgcctcgccctgctgcagcgtctggcggaaaaacacctttgggtcggccggggaggcaaagtgcatgacccccacgcgcgacagcccgaacgcgctatccggacacgggtagaacccggccggatgtcccagggccagggccgagcgcacggactcgtcccacgcggcgactcggggggtcaggcggtccagggggaatgccgcctgcagctccgggcccgacacgcggcccgcgagaatctcgaccgtcgcggaaggccgcgccccggggccgtcatcgtgcgcgacggcggcggggtagtcgtcctcctcgtagttgagctcgtccaggaacagcggcgagggcaccacccgcgaaccgcccacccgccccaaaacgtcgcgtgggtccatcgggcccaggtagcctccccgcggggcccgcgtgatggcgctgtcccggcgtccgcgaacggactggctcctggccgtaacggacctggggcgcggaaaggacgcccggcgggggggcgccgccgcccgggcctcggacgcgcgtcgggacccggggtgaccgcgggcctcccggcgacggcgcgggggcggctcttcgctcgccatctcccccgcggcctcgacctcgctgtcgtcgtccacgttaaacaccgcccgcaggtaccccattaacccgactccaccgccctcgggctcgtcctccacgggcgagtcggcgcgatgcgcggacggggcatgggaccgggtggaggcgcgcctccggcgtacggcatgcccgcgcacggacatggtggccggaggcccgattttttacacacgccctccccgcagacggacgaggaaaggggtggtgcgaggggggaggcccaaacggggaggtggggggtagggggcggtcccagggagcggggggtaggaaccggcacgacgggaacagagaaaacgcgaccgctccaacaagggtgggggggtgggcctcgtccccacgcagacccgcgggcaaatgcgagaacgggacccgcgcgcctgcctttatacgcggaccccagcaccacgagccgttctgtgacgcgaatctacacgaccgcgggctcgtaggcgcgactaacgcccaacccaacggcacacaccccccaccccgcgcgtaaccccatttctttcatggtcccgtaataaacagccaacgcacgccgcgtatgatgagttgcttgccaatgtttattgctgtggttgcgaaccctctatcgcgatacagacggaggtgaggcggggcggtggtggggggggggcgcgccgcccggtcgcacatcctaccccccaaagtcgtcaatgcccatggcatcggtaaacatctgttcaaactcaaaatcgtccacgtccaaagccccatacgagacggggtcgtgggtcattcccggggagggggactccacgtcccccagcatctccaagtcgaagtcgtccagggcgtcggcgggcgtcatatccacctcctcgccgtccaggcggagttcgtctcccaggctgacgtcggtaatgggggcggtggtggacagtctgcgggggcgttgtcccgcggagagaaacgacatgcgcggcgccaccagcccggcctccgcaggagcgtcatcgtcgtccgggaggtcgagcaggccctcgattgtcgatccgtaattgtttctggtccgcccgcggctatacgcgtgctcccgcatgacggactcgccctccgaggtcgcgacgctggagtacgagtccaacttggcccggatcagcagcataaagtacccagaggagcgggcctggttgccctgcaggacgggcggggtcgtgaggggcgccccgggttcctccgccgccgcacttcgcaccagcgggaggttcaggtgctcgcgaatgtggtttagctcccgcagtcgccgggcctccacgggaactccccgcacggtgagcgatccgttgataaacatcaggggctgaaacagacacgccaactggcgccagctctccaggtcgcagcagaggccgtcgaacagatcgggccgcatcatctgctcggcgtacgcggcccataggatctcgcggctcagaaagaggtatagatgcagaaacaggacgcgcgccaggcgcgcggtctcgcggtagtacctgtccgcgatcgtggtgcgcagcatctcccgcaggtcgcggttgcggccccgcatgtgtgcctggcggtgtagctgccgaacgctggcgcgcaggtaccggtacagggccgagcaaaaatttgccaacacggtccggtagctctcctcccgcgcccgcagctcaccgcggaaaaactgcgccatggcctcgtagtacgaaggcagctcgtcgcgggtggcgggcagggtggggaacgccacgtcgccgtgggcgcgaatgtcgatcggggagcgctcggggacgtgcgcatccccccagtcgatcacgtcgctgggcagcgtcgacagaaacttgcactcccggtacatgtcggcgttggtcgggaacccagagaacaggtcctcgttccaggtatctagcatggtacacagcgcgggacccgcgctgaagcccagatcgtcgaggagacggttaaacagggccgcgggggggacgggcatgggcggcgagggcatcagctgggcctgactcagccgaccggtggcgtacagcggaggggcggctggggtgttcttgggacccccggctggcctggggggcggtggcgaaaccccgtccgcgtccgcaaacagatcgtcgaccaacaggtccatgggggcggttgggtccgggaataacgatctcgagaggcgaatgagacgtgcccgagcgcccggcggcggagagggggggagggatccgggacccgcgacagaaaaaggccggggccctcgcgaagggaatcgccgggggtgccgtgcgtccccgaggactgacatctcgcgtccaccaccccgcatttaagtatcaccccagtgccgccccaaacctcgtgacttccccaccgctccgggcggcccgtcccccgcgctcggaagggaggcgtgtccttcctcccgcccctcccgcccctcccgcccctcccgcccctcccgcccctcccgcccctcccgcccctcccgcccctcccgcccctcccgcccctcccgcccctcccgcccctcccgcccctcgccacaaacgcgtgctgacagcgaagtggttaaatcgaccgtgatgctttattgtctgtcgtctgaacgcggtcggggtcgctactcgagggggcggcggggacgggaagccgagcgggcgggggcccgtgcggtcgcggcggcacgccccgcggggcggccccgggcggccgcggtcgcgtcgacgtcctgcgccgcgtcgggattcaccaactcgttcgcgcgctgcaggaggttcttgccctcgcagaccgtcacgcgaatggtggtgaggtcgaggagctcgttgaggtcttcgtcggtgtgcggccgcgacatgtcccacagctgtaccgccgccagccgggcgtgcgtggccgccaggcgcccgaccgcggcgcagaagacgcgcttgttgaacccggccacccggggggtccacggcgccgtggggctcggtggggcggtgctgaagtgcagcttcttggccagtccctgggcgggtgtcttggttcttcccgaggccgtgggagcgggggcgtctaggagcacggcggagtcggcctgggcgggtcgcctgccgcgggcggggtcggtcgccggggtcgcggaggccttaggcgccccgcgcgtcattttgggggtccgcgcgggaggggcgtgcgagcgcccgccggcgcccacggggcccccggggggtggaggagcgcgcgcggggccggggccgtgagagcccgcgacggacgccgaacgacgcggtcgcgcggtatcccgggactcgtcgtcgtccgaagacgagtcccggtagagggcatacccagcctcgtcataatggagaaagcgaacctcgcccctcgggcgcgcgcgcatcgggccagcgccgcggcggaagtcgtcgcgcggactctctgggtccgccggggagaccgggccatagtacagctcctcgtgggtcccgcgcggcgcttcccgcggacacgacttgacggagcggcgagaggtcatggtctatcggagacaccggggacgcccgtgcggatcacagggaaggcgtcggcgaaggaggcagagagcgtcggaaggcggcgagggagggaaagagggagaccggcggggtacgggagagcagcgagggcctgcgtaacccacgggggccgcgggagtggctccctgcgggttgcgggggagagtttataggaagtggatataaccgcaggcgacgggactaaccaatccccgggggggcaacggacagacacgccccgaacaggcccgacttccgcgaggaagcaaaggccgggggccgcccaacgacacgcccaccccttcccaacagggcgggctcaggctgacccggcggccagtgcccgctgacatatctgatacacgtgcgcgatcatacatacgcccatcgaggtcatgcctagataaaagggcaccaggacccccgggacggacaccacaccggcgctgtcgccccggcattgcgcgtccccgataacgccgcgtgcgcctgccgcgttcggcggctccccgggcacgcccgcgacgagcgcgacgaacaacagcaccacccagcggcccagtcttgcgggtttccccgtcatcgcggcgatgagtcagtgggggcccagggcgatccttgtccagacggacagcaccaaccggaatgccgatggggactggcaagcggccgtagctattcgcgggggcggagtcgttcaactgaacatggtcaacaaacgcgccgtggattttaccccggcagaatgcggggactccgaatgggccgtgggccgcgtctctctgggcctgcgaatggcaatgccgcgggacttctgcgcgattattcacgcccccgcggtatccggccccgggccccacgtgatgctcggtctcgtcgactcgggctaccgcggaaccgtcctggccgtggtcgtagccccgaacgggacgcgcgggtttgcccccggggccctccgggtcgacgtgacgtttctggacatccgggccacccccccgaccctcaccgagccgagctccctgcaccggtttccgcagttggcgccgtccccgctggcagggttacgagaagatccttggttggacggggcgctcgcgaccgccgggggggcggtggccctgccggccagacggcgcgggggatcgctggtctacgcgggcgagctaacgcaggtgaccaccgagcacggcgactgcgtgcacgaggcgcccgcctttctgccaaagcgcgaggaggacgcaggctttgacattctcatccaccgagccgtgaccgtcccggccaacggcgccacggtcatacagccgtccctccgcgtattgcgcgcggccgacggaccagaggcctgctatgtgctggggcggtcgtcgctcaatgccaggggcctcctggtcatgcctacgcgctggccctccgggcacgcctgtgcgtttgttgtatgtaacctgaccggagtcccggtgaccctacaagccgggtccaaggtcgcccagctgctcgtcgcggggacccacgccctcccctggatcccccccgacaacatccacgaggacggcgcattccgggcctaccccagaggggttccggacgcgaccgccaccccccgagacccgccgattttggtgtttacgaacgagtttgacgcggacgcccccccaagcaagcggggggccggggggtttggctccactggcatctagaccgcgcctcgcgtcgggccagatggggccccggtcaataaagagctctgtttcgcatatgccctggtgttggcggtttttttttgttgtctgtctgcccggcgctcggttgtccgttctgtcgtcgctatcacatacgcacaaacacacgggtagagtggaaccgaaaccggtcgacgtttattcaccacacagaaacacaagctaagcgagaaggaggggggcctcggtcgacgaggcctggcgtttgggggcggacgtgcgatgacgtgggtccggtgtagggtccgcggggggcacgggcccggggcgaacgggggatctgtcgccggcgtgggtgactgggaccgacgcaacctccggggcttgtgccctcgtaggcccggggggggcctcggtcgctccaagccccgcggtgcgggtccctccggccagagccgaggtggagagaccaagggcccgctccgcgatcgccacgtcctccatgaccacgtcgctctcggccatgctccgaatggcctgggagacgagcacgtccgccgacttgtccgcggcccccaccgacatgtacatctgcaggatggtggccatgcacgtgtccgccaggcggcgcatcttgtcccgatgcgccgcaacggccccgtcgatggtggagccctcgagtcccgggtggtggcgcgccagcctctcgaggttgaccatgcaggcgtggtatgtgcgggccagggcgcgcgccttcacgaggcgccgggtgtcgtccagcgactctagggcgtcgtcgagcgtgatgggggcgggcaaaagcgcattgaccaccgccagggcctcctgcagccgcggctccgcctccgagggcggagccgcggcccgaatcatctcatattgttgttcctcggggcgcgttccccaaccgcacagcaccccgagcagggacgccatcccggaacacgcgcgcggctctgcgccggctttcccccaccccaccccctccgggttcgcaggggcgatggggacggaagactgcgatcacgaagggcggtcggttgcggctcccgtggaggttacggcgctgtatgcgaccgacgggtgcgttatcacctcctcgctcgccctcctcacaaactgcctgctgggggccgagccgttgtatatattcagctacgacgcgtaccggtccgatgcgcccaatggccccacgggcgcgcccaccgaacaggagaggttcgaggggagccgggcgctctaccgggatgcgggggggctaaatggcgattcatttcgggtgaccttttgtttattggggacggaagtgggcgtgacccaccacccgaaagggcgcacccggcccatgtttgtgtgccgcttcgagcgagcggacgacgtcgccgtgctccaagacgccctgggccgcgggaccccattgctcccggcccacgtcacagcaactctggacttggaggcgacgtttgcgctccacgctaacatcatcatggctctcaccgtggccatcgtccacaacgcccccgcccgcatcggcagcggcagcaccgcccccctgtatgagcccggcgaatcgatgcgctcggtcgtcgggcgcatgtccctggggcagcgcggcctcaccacgctgttcgtgcaccacgaggcgcgcgtgctgggggcgtaccgccgggcgtattatgggagcgcccaaagccccttttggtttctgagcaaattcggcccggacgaaaagagcctggtgctggccgctaggtactacctactccaggctccgcgcttggggggcgccggagccacgtacgatctgcaggccgtgaaagacatctgcgcgacctacgcaatcccccacgacccacgccccgacaccctcagtgccgcgtccttgacctcgttcgccgccatcactcggttctgttgcacgagccagtactcccgcggggccgcggccgctgggtttccgctgtatgtggagcgccgcatcgccgccgacgtacgcgagaccggcgcgctggagaagttcatcgcccacgatcgcagctgcctgcgcgtgtccgaccgggaattcattacgtacatctacctggcccactttgagtgcttcagccccccgcgcctggccacgcatctccgggccgtgaccacccacgaccccagccccgcggccagcacggagcagccctcgcccctgggtcgggaggcggtggaacagttcttccggcacgtgcgcgcccagctgaacatccgcgagtacgtaaagcaaaacgtcacccccagggaaaccgccctggcgggagacgcggccgccgcctacctgcgcgcgcgcacgtatgccccggcggccctcacgcccgcccccgcgtactgcggggtcgcagactcgtccaccaaaatgatgggacgtctggcggaagcagaaaggctcctagtcccccacggctggcccgcgttcgcaccaacaacccccggggacgacgcggggggcggcactgccgccccccagacctgcggaatcgtcaagcgcctcctcaagctggccgccacggagcagcagggcacgacgcccccggcgatcgcggctctcatgcaggacgcgtcggtccaaacccccctgcccgtgtacaggattaccatgtccccgaccggccaggcgtttgccgcggcggcgcgggacgactgggcccgcgtgacgcgggacgcgcgcccgccggaagcgaccgtggtcgcggacgcggcggcggcgcccgagcccggcgcgctcggccggcggctcacgcgccgcatttgcgcccggggccccgcgctccccccgggcggcctggccgtcgggggccagatgtacgtgaaccgcaacgagatcttcaacgccgcgctggccgttacgaacatcatcctggatctggacatcgccctgaaggagcccgtcccctttccccggctccacgaggccctgggtcactttaggcgcggggcgctggcggcggttcagctgttgtttcccgcggcccgcgtagaccccgacgcctatccctgttattttttcaaaagcgcctgtcggccccgcgcgccgcccgtctgtgcgggcgacgggccctcggccggtggcgacgacggcgacggggactggttccccgacgccggtggtcccggcgacgaggagtgggaggaggacacggaccccatggacacgacccacggccccctcccggacgacgaggccgcgtacctcgacctgctacacgaacagataccagcggcgacgcccagcgaaccggactccgtcgtgtgttcctgcgccgacaagatcgggctgcgcgtgtgcctaccggtccccgccccgtacgttgtgcacggctccctgacgatgcgtggggtggcgagggtgatccagcaggcggtgctgttggaccgcgacttcgtggaggccgtagggagccacgtaaagaactttttgctgatcgatacgggcgtgtacgcccacggccacagcctgcgcttgccgtatttcgccaagatcggccccgacggctccgcgtgcggccggttattgcccgtcttcgtgatcccccccgcgtgcgaggacgttccggcgttcgtcgccgcgcacgccgacccgcggcgcttccactttcacgccccgcccatgttttccgcggccccgcgggagatccgcgtcctccacagcctgggcggggactatgtcagctttttcgagaagaaggcgtcgcgcaacgccctggagcactttgggcgacgcgagaccctgacggaggttctgggccgctacgatgtgcggcccgacgccggggagaccgtggaggggttcgcgtcagaactgctggggcgaatagtcgcgtgcatcgaggctcactttcccgagcacgcgcgggaatatcaggccgtgtccgttcgccgggccgtcattaaggacgactgggtcctgctgcagctgatccccggccgcggcgccctgaaccaaagcctctcgtgtctgcgcttcaagcacggcagggcaagtcgcgcgacggcccggacctttctcgcgctgagcgtcgggaccaacaaccgcctatgcgcgtccctgtgtcagcagtgctttgccactaaatgcgataacaaccgcctgcacacgctgtttaccgtcgatgcgggcacgccatgctcgcggtccgctccctccagcacctcacgaccgtcatcttcataacggcctacggcctcgtgctcgcgtggtacatcgtctttggtgccagtccgctccaccgatgtatttacgcggtgcgccccgccggggcgcacaacgataccgccctcgtgtggatgaagataaaccagacgctgttgtttctgggcccgccgaccgccccccccggcggggcatggaccccccacgcccgcgtctgctacgccaatatcatcgaaggtcgggccgtgtccctcccggccatccccggcgccatgagccgccgggtcatgaacgtgcacgaggccgtaaactgcttggaggccctctgggacacccagatgcgcctggtggtcgtcggttggtttctgtatctagcgttcgtcgcccttcaccaacgacgatgcatgttcggcgtcgtgagtcccgcgcacagcatggtggccccggcgacctatcttttgaactacgccggccgcatagtgtcgagcgtgttcttgcaatacccctacacgaaaatcacccgcctcctctgcgagctatccgttcaacgccagaccctggtgcagctgttcgaggcggatccggtcaccttcttgtaccaccgcccggccattggcgtcatcgtgggctgcgagctgctgctccgcttcgtggccctcggtctcatcgtcggcaccgctctcatctcccggggcgcctgcgcgatcacacaccccctgtttctaacaatcaccacctggtgtttcgtgtccatcatcgccctgacggagctgtatttcatcctgcggcggggctcggcccccaaaaacgcggaaccagcggcccccagggggcgctccaaagggtggtcgggcgtctgcgggcgctgctgttccatcatcctctccggtatcgccgtgcgcctgtgctatatcgccgtcgtggccggggtggtgctcgtggcgcttcgctacgaacaggagattcagcggcgcctgtttgatctgtgacgtaacgcctcttccgttggaagaggcggacccagtcgcccatacaaattaaatacacgacccgcctcgggcctacgcaccctcgcacgtcgcatgcaaattaaaatcgtgcacagagccgatccggcctcgggtctgcttgcccctcccccggcccagcacaggcaggctcgtccgacttccgcatacaccccaccctaccgcgtgcttccgcacccccgcctacgcgtgtacgcgaaggcggacccagacctgccgtatgctaattaaatacataaaacccaccctcggtgtccgattggtttctggggacggcgggggcgggggcggtgacgcccgacggggagggacaaggaggagtttcggaaagccggccccggtcgtgcgggtataagggcagccaccggcccactgggcgctgtgtgctgccgtgtgccgaccccggttgcgcgtcggtgccgctcctcgattcggacccggccactctcttccgacacgcgccccctcggaggacacccgccatcccagccccggcgacctacaacatggctaccgacattgatatgctaatcgacctaggattggacctgtccgacagcgagctcgaggaggacgctctggagcgggacgaggagggccgccgcgacgaccccgagtccgacagcagcggggagtgttcctcgtcggacgaggacatggaagacccctgcggagacggaggggcggaggccatcgacgcggcgattcccaaaggtcccccggcccgccccgaggacgccggcacccccgaagcctcgacgcctcgcccggcagcgcggcggggagccgacgatccgccacccgcgaccaccggcgtgtggtcgcgcctcgggaccaggcggtcggcttccccccgggaaccgcacggggggaaggtggcccgcatccaacccccgtcgaccaaggcaccgcatccccgaggcgggcggcgaggtcgccgccggggccggggtcgatacggccccggcggcgccgactccacaccaaaaccccgccggcgcgtctccagaaacgcccacaaccaagggggtcgccaccccgcgtcggcgcggacggacggccccggcgccacccacggcgaggcgcggcgcggaggggagcagctcgacgtctccgggggcccgcggccacgaggcacgcgccaggccccccctccgctgatggcgctgtccctgacccccccgcacgcggacggccgcgccccggtcccggagcgaaaggcgccctctgccgacaccatcgaccccgccgttcgggcggttctgcgatccatatccgagcgcgcggcggtcgagcgcatcagcgaaagctttggacgcagtgccctggtcatgcaagacccctttggcgggatgccgtttcccgccgcgaacagcccctgggctcccgtgctggccacccaagcgggggggtttgacgccgagacccgtcgggtttcctgggaaaccctggtcgctcacggcccgagcctctaccgcacattcgcagccaacccgcgggccgcgtcgacagccaaggccatgcgcgactgcgtgctgcgccaggaaaatctcatcgaggccctggcgtccgcggatgagacgctggcgtggtgcaagatgtgcattcaccacaatctgccgctccgcccccaggaccctatcatcggaacggcggccgccgtgctggaaaacctcgccacgcgcctgcgcccctttctgcagtgctacctgaaggcccgaggcctgtgcgggctggacgacctgtgctcgcggcgacgcctgtcggacattaaggatattgcctcctttgtgttggtcatcctggcccgcctcgccaaccgcgtcgagcgcggcgtgtcggagatcgactacacgaccgtgggggttggggccggcgagacgatgcacttttacatcccgggggcctgcatggcgggtctcattgaaatactggacacgcaccgccaggagtgttccagtcgcgtgtgcgagctgacggccagtcacactatcgcccccttatatgtgcacggcaaatacttctactgcaactccctattttaggcaagaataaacatattgacgtcaacccaagtggttccgtgtgatgttcttggcgcgcgcggcgggtggggcggagactccggggcgatgccggcgtgcgcgtgggaggagggcgatgacccaccggataaatgtggggccccggcccggcccgcttcatagcgcgtccaggaactcacggcagacgcgtattcaccgacccccccctcgcaacatgacaacgacgcccctctcgaacctgtttttacgggccccggacatcacccacgtcgcccccccgtactgtctgaatgccacgtggcaggccgaaaacgccctgcacacgaccaaaacggaccccgcgtgcctggccgcgcggagttatttagtccgcgcctcctgctcgaccagcggccccatccactgttttttctttgcggtgtacaaggactcgcagcactcccttccgctggttaccgagctccgcaacttcgcggacctggtcaaccacccgcccgtcttgcgcgaactagaggataagcgtggggggcggctgcggtgcacgggcccattcagctgcggaaccatcaaggacgtctccggtgcatcccccgcgggggaatacacgataaacggtatcgtgtaccactgtcactgtcggtatccgttctccaaaacctgctggctcggggcatccgcggccctacaacaccttcgctctataagctcaagcggcacggccgctcgcgcggcagaacagcgacgccacaaaatcaaaatcaaaatcaaggtataacccacccccttccctccgagtccgtatgcaacctcattaataaagagtgagaaccaaccaaaacagacgcggtgtgagtttgtgggttataggaacccggtaaataccacgcgacgaaccagcatgtgtgttaacgcaacttttattcgttgtatcgcgggaggggggaagcttaccgccaaaggaaggccaagatgataacgacgaccaccgcgaccaccccaaaaaccgcatgacgacacgtcccgccacaccaccctggggcttggggcgtgtcggagctcgacgcacagcgggccgcgcgttgggcccggtacagctctcgcgaattgacaagcgggggtcgccacgtgcgcgagctttgcacgcggggttggtcggccggccccacggacccgcccggtggctcggtcggacatgcggccatgaccatggcgtaggtgggggggcgatccgaggtcgcctctgcgtaagtagggaggcccgacgggaggtcgcctcccacgccagggtgggccccaatcatagtttccggtagaaacaggggggtctccacaaacaacccccctgggccaaagctccggcgccgcgcccgtcgttcggcgcggcgcctggcgcgccgagcggcccgccaggcggcgcggcgcgagcggccacgctcacacacctcgccgtcaccggaagaagccggtgaaacaagcccaaccggcgacgtccctgcagagtacggtggaggcgagtccgtgggggtgtcgatatcaataacgacaaactggcccgcgctcgcgccggccacactctcgtatgggggcggggcgtcaatcacgctatcatctccgtcatccctgcatgcgtgggcatgcccagcccccaacgccatggtggggattcgcggctcagaagcctgcatgtcgtgtggtcggtcgtagtccaacgtgcctcccccacccaccacacagccggtccccacgccgaccactagaccgcagacgtcgcccaaccgaggtccccgtgcacagaccgcgccttttatagccccaggggttgctaattaacgcacgcatgcagacgcaatttattttgctcccccgcgtcctcccctcccctgcgcacacgtgataggtcttgggaacccgaggggcgacgcggggaaagcgcgcccccgcccggccgccgcgcgcccccgcccggccgccgcgcgcccccgcccggccgccgcgcgcccccgcccggccgccgcgcgcccccgcccggccgccgcgcgcccccgcccggccgccgcgcgcccccgcccggccgcccgcgtcgcgccggcgccccctcccggcgcttccggggtctttccttccttccccgccgcgaccccgaccccgccccaccgccccgcccggcaggggggccccggcgccgcgcagaacacacagacgaacacacggtggcgatcttttctttacttcggcggaccagcgagccccggccccggcccgcgccccgccgccacacccacggcacccccccccgccgcccaccccggggtccacacaggagcgcgcgggcggcagaaacgcgggcgcggcggcggtcggggtgggagtggtggtgggggacacgaaaacacacccacgacactctccccccaccccgaccgccgccgcgccccaccggcgggatcgcggcgagacgcagccgggcccccccccaccacccgcccacccacctaccccgcgcccgcagcctccggcagcacgccgaccaccgccgccaccccccaaacagccaaggcgcggtggggggcgtggtggtgaacgatggggggaacacgggggggaggggtccggggcgaggcgggcgggcgaaggaagggggggtggtggcggcggcggtggaaagcggaaaaacggaggatggaagggcagaagatggggagtcccgatcctcctcctgcatcccctcgccttccattctccggccctccgcgagtcccgacgccccccccccgccgcccgacgaaggagacccaagcaccgcagccggagaggccgagcggggagtgggcggccgggcgggaggatggcggagagagagagagagagagagagagggggggggggggagagggaaagcaacgggaaagagaggcgcgcggaaaagcagcaagaggggggacggggcgagccgggcagagtgcggagcccccggagcccgcggccgcagccgagcagcgccgcgggctccggggccgggccgggccggcaacgccccgcgccggccgcggcggagagaacccctgtgtcattgtttacgtggccgcgggccagcagacgggccgcgggccagcagacgggccgcggcgccagcggcccacgcctcccgccgcattaggcccccgcgggcatccggcggccggccccacgcccttccattaaacactcccacgttgggggggggcgcgccagctgagtgctctgcggttgcgggcgccgtgcccggagatccattaagccgccggagagcccgagccccgcccgcgtgttgctgtgggcatttctgctgcgtcatccctgtctttataaaaccgggggcgcggcagcaacgaacgcaggggcccgccgccgatcgagagggactccggagaaggaaggctgctccgcgcaccggcgcgcccttctcctctcccctccctacctccccctctcttcccccttttttcccccgcctcccgtcttcttccgcgcctccgagggtccgcctcttgcctcggggacccccgggcgggccggggcttggccgccgaggtgcgccccggccggaggggcccccgcacctcggcggccgccccctccggcgccgcgcgttcgcgaaaggcgcgaaaggggcccccggaggcttttttcgattcccggccgggggtcccgggtagccgcccggcgccgggcggaaggcgtcccccgcccggcggtccggcccgggcccccggcggagcgcgggggccccggggccccgggccgcgccggcggcgtttccgcgttccgtttcttctccctcccgggccgccccgctcccgggcccgaccctcgccccttcccttctcctcgtcttcccccgtcccgccgcgccccttccctcttccttctctctctctgtctcgctctcctcacatttcccccccccccccccgccgccgccgccctttgcccgcgtcccaccgagacgccgcgccgcgtgagccgtccgccgggggacccaggctccggggggggggggcgcctgcgtgtgtctcgtgtgagagagcgcgcccctcgaacgccgcgcgttctcgcaggtaggtttagggtcgtacaggtgagcttctgctgaggcggcggggagagggggggggggcgggcggaagagagaagagagcaggggttgggggagaactgttcttcctccccctttcaagaaacacgaggcgggggtcccagaaagggcaggcaggtcagccgcaccgcccgcgagccaacccgtatcctttttttctaggtgtttttgtttttgtttctgtttttgtttgttttgttattattttcgcggatccggcgtgttcggatccaccccccctttctccttcctcttcccttccacccacccccgtttcccccccccccgtcgtcgttcccgggggggcaggcgcgggtcgggcccgtacgcccaccgcccccacgcgccggtcacccccccccaacaaccccaaaggcgcgtgcccggccacagccgtgggtgtggcgcccgtccccttcctctaccgcgtgggcgcgggcgggggggtggtggtagtggtggcggaaggaaacgggccgggggccggggccgctagggaaaggtaggcacgcgcgcggtgtgtcgacttgcatgccccgcaaaacgcgtcgtgtcgtgttgtgtcgtggtgggccgtgttgtggtgggccgtgtggtgtggtgtggtgttgcgaacgcgcgagccccctcgccccgatgggagtctccccgcagccagggtaaggaggggcgggcgtggcgggcaggtgtgcgggcggggtggggtgagtgcggttgcatgcctcgggtctcctcttcctgctcctcctcctttctcccagccagggtgaggaggggcgggcgtggcgggcaggtgtgcgggcggggtgggcgccggggcgggggtgggcacgggcgtaagtgcgggtgcatgcctcgggtcttctcttctccctcctccttcctcccacccgtccccgggggcagagggcgtgcatgcgttgtgattcaaccgccctcgcccccgccccactttcccccctctctatcaaagttccctggcccctggcttcgcgccggtggtgcggctgaccccccccctcctccctccccgagccaggcgccctcccactcctgcccaccacccccagggtctggccggccagacgtgcgtgctctgcacgatcgggcccccctccctgtcaacacggacacactctttttttacccgccagccagcccgcccacccaccaagacagggagccagaacgaggccgggccccggctctgttctatgataaagaccaacaggcctcgggggtgggggcggcttctcgtgcccgccccccctcctcctcctcccttcccccccatccccggcccccctgcgcgggggagctgcatcaaaggccaacaacaaagtgtgtcaaaagcatcacaaaactttattgtaaaatttttataaatataaagttttttttttcctcaagttttcaacaaggccagaaagtccataacaaaatgctggtgtgtgttgctgttcggggccgtgtccgtcccccccccccactcccacccccacttcctgtctcctccccgtctttccccccccccacctccccctgcccccgaggcgcctcggccggtggtccggtggggggcggcttccttcgggcagcaagccgagtgttagctccccctactccccgtggcccgcgggggcgtcgccggccggcgcgggcgcgccctgctcccgagaccacgggtggcgcgaccggaggccgtggaagtccagcgcgcccaccagggtgccctggtcaaagagcatgttgcccaccggggtcatccagaggctgttccactccgacgcggggggcgtcgggtagtcggggggcctcacgcagttgcgcgcgtgctcggggagcagggtgcggcggctccacgcgggggccgcggcccgcagcaggtccgccacgttccccgtctggtccacgaggaccacgtaggcccctatgtggcccgtctccatgtccaggacgggcaggcagtcccccgtgaccgtcttgttcacgtaaggcgccagggccacgacgctcgagacccccgcgatgggcaggtagcgcgtgaggccgggcgccgggtcgcgggccccgggctcggggccgccctccgcgtggcgcgtcttcctggcacacttcctcggcccccgcggcgcagcagcgcgggggccgagggaggtttctcgtctctccccagcgccggacgcggacgcgacgctcccaccagccccgcccgcagaggaagaggcggaggaggaggaggcggaggaggaggaggcggaggaggaggaggcggaggaggaggaggcggaggaggaggaggcggaggaggaggaggcggaggaggaggaggcggcggcgaccgcggcctgggacgacggagacgccgacgggggcgcggcgcccgcggacgccggggcgagcggcccgtggccgcggtcgcccgagtccgagtccggggcccggcgcggcgccgccctcttggcccccaccccctggggggcgaggggcgagcgcggggcggcggaggaagaggcggaggacgaggccgcggggcccgagtccgacccgcgcctcttccgggggcgggccgccgccccctccgcggcgtggggggcggcaccgggggtgttggtgccgcgggggaccccgggtcctccctccgcgcccggccctcccgacccgcgcgcgtcggtcgcgcctgcccggcccagactctgtgcttgggtgtcggtctgagcctgggtcatgcgcgaccggggcgcgcggtgcgcgtccaccggcacggcgggcggcgcgggcccggccgcgtccgcgctcgcagacaccacgggggcggcggcggcgcggggcggactccggacgcgcggggcgacggccgcgcgggggcgcgcggcgcgccccgacgactgtggcagacctccccccccggggcccgaggacacctgtgcggaggaggaggagacaaaggagagcggcccggggcccgcggggcggcgcggagacggcgggggagagtcgctgatgactatggggggctcctgggccgcgcggggctgtctcgcggggggcgtcctgccctccgccgccgcggcgtcttcgcccacccgccgcgcctgcgcgcgccccccgccggccgcagggggaagagaggccactctcggcacgacggccgcgacggcagggccgcccccagacccagatcccacccccgcccgcaacggggcgccgccgctgctgctgctccgcggggcgccagggggcgccggtcgggtcgcggcgggctgggaggttccgcgggtcgcccccgcaccgccgcccccgcgccggggcgctcttcggggggcgggcgggacgtagtccactgcagagggagacagagacgggagcccccggttagtgcccgacccccgcccgacccccgcccgacccccgcccgacccccgcccgacccccgcccgacccccgcccgacccccgcccgacccccgcccgacccccgcccgacccccgcccgccccccgcccgacccccgcccgccctcaccgtcggccaggtcatcgtcctcgtcgtccgtgccgggccacgggggggtgggcgacagggcgcggaccgtgtgtccccccagcgacagggagcgcggggccgtccgcgggttgcccgtccagataaagtccacggccgtgccggcccgcacggccgcctcggcctccacgcgggtccgggggtcgttcactatcgggatggtgctgaacgacccgctggcggtcacgcccactatcaggtacgccaccggggtgttgcacaggggacacgtgttgcgcaacggaatccaggtcttcatgcacgggatgcagaaggggtgcaggcagggaaaactctggcagcgcaggggcggggcgatctcgtccgtgcacacggcacacacgtcgcccccccctcccgcttccgcttcctcctcacccacgggcccacccccacaggatccctgcgcgtcggcgggcgtggggctgccctggcgctcggccgggggccgggccgggggcgtggccgcgtccatcaggcccgcctcgaacatctccgtgtccgtgctgcccgcctcggaggtggagtcgcggtgaaggtcgtcgtcagagattcccacctcggtctcctcctccgagtcgctgctggcgagccactgcatgtcgttgagcatcccccaggcgtgcggggcggcgggctgcttgacaaagcaacgggggggatttagagggcgcggggcgtgaggcgggacccccgcgccgtgtcccccgtgtccctccctcaccccggccccccgcccgctgctttttgttcggaagggggggagaaaggggtccgtaaccaaaggtggtctgcgtcctttggattccgacccctcgtctccccccctgtcccccgctctcgggctcctccctgcctccctcgcccccccagagggtcggggggcggcgcacggcccacgggggtcccccgaccgcttaagcgggccgggggtcggccccgtcaagcgtccccgcccccgagcccaccgcccgcgaccacccccaacccgcagccgggtggtccggggaaaagggggggcctgagacccgggggtcgccctctcaccgtgccgggggtctgccgcggcggccgctcggggccggggtccgcccgggagctcgtgccgggccggggttccatgagccggggtagggtagactcgagacggcggcccgcggtctctctcttgccgggttttagtctctgtctctccgggtctcctcctcccgccgggccgccgctccgtcgctcgcagtgccggggtgcgaatgcggcccgaccgtcacacggggctgccttatacccggcgcctatccactcccccaaaggggcggcatttacgattcccccaatagccgcgcgccccggcgggggcggagggagggaatccccccctctcggggcggccccgtccccggggaccaaccgggtgtactccaagaaccccattagcatgcgccgccccccgccgacgcagatgggagtccccccggcgccccgccggcgcggccctgagtggtgcccgcccccggggaaaaattcattagcatactaggaagcccaggggaccaataggggccgatcagcccacccacccggcggcgcgcgaggctctgcgtgttctgccaagaaagtaatcagcataacccggaaccccgagggagtaattacgcggggagcgaggggccgtccgaacgtttttaattaccataagcgggaatggcggcccgttaaaagctgctaattaccgcgagcgggaacgccggcccattaaaagttgctaattaccatgcgcggggatggcggccgggaccgcctattaaaagtttctaattaccataccgggaagccggcgcggggcggtcgccggggcggagtccgggcccgcgcggcggcgcgcggttggccggcgccgccccctggggcgggcggagcggcggggcggcgccgggccctcgcggatatatacgcggggctcccatcgtctcttcggagagcggcctcgcgcagaccttcggagctccggggctccgccggccgaggccgccctcgccggttcaaccctagaccgcccgacggcccgggcccgcggcggcggaggacccgcgcgccgccgccgccgcctcctcctcctccgcgggtccgccgtcttcgtgggcccgggctcgggctcgggcccgagctcgggcctcgggctccaggcacggtccgatgaccgcctcggccgccgccacgcggcgccggaaccggtcgcggtcggcccgctcgcgcgcccaggacccccgtcgggccaggcgcgcggccgtctcccaggccaccagatggcgcacctgcacgcgcggcgagaagcacacctgcgggcggggagacacgggggtcggaggggcgtcagggggtcggaggggcgtcagggggtcggaggggcgtcagggggtcggaggggcgtcagggggtcggaggggcgtcagggggtcggaggggcgtcagggggtcggaggggaggcgtaccttcccgcgcggcgcgtccgcgggcggggacgcggggggccgccgccggcgcaggctcaggcgcgccaggtactccgtcgtggtgcgcagccgtagcgccaggtggggcggaagggggcgctgcggcccgcgctccttgcgcggcggcggcggggggcaggcggcggcaggcgcggcgtgcggggcctccggcgccttccccccgccctcgctcggggggctgttcgcccactctgcgtcgtcgttgccggcgtagtccgcgtcgtcgctgtcgtccgcctggggcaccagcagccagcgccgcaggagcgaggacgcggccggcgcgctctcgaccgcggttcccgagtcgtacgcagggaccatttgggagtctgcggttgggagcgcgccggggcgcggcacggctggagcgccggggcgcggcacggctggagcgccggggcgcggccggcgccggggaccccggcggcggggaccccggcggcgggacatggcgggcggctgggctcggcgtaggcccggagccggagcgcgtcggggcgggagagttcactcggcacgcatgcacgtgtaaccgccagtccgtgcttgcctagcgaactcacccgtcccggctggcgtgcgcagcccgggccgtgttgcgggccctcttaaggggcggcggcaggacggggactcccgccccgcctcttttcccccggggagtcaacccccggggggggtgttttttgggggggggcgcgaaggcgggcggcggcggcgggcgggcggcagggcagccccgcgcgcccccttccccgtccctcccccggagccggccgctcccccgcgggcgccgcccctccccccgcgcgccgcggggctgccttcccgcgggcgcccccgcgcggcttttttcccgcgcccgcccccgcgcggcaggacggggactagcaggctgtgccgcagaccaccacacactcccaagctccccgcccccccgaagacgccagtcgcaccaccgctcgccctcgcagaccagacagttgcaccaagcacccgcccgcccgcacacggttccccgccaccccctccctcccctccatcccgccgagctcgcggcagcccctcccccccgcgcgccacggggctgcggtcccgcggccgcctcccccgcggccgcctcccccgcgccccgccccgggggcttcccccgcccctccccccgcgcccgcggccccgagctcgcagcagcccctccctcccgcgccccgtgccttccctcccgctcctgcgggggggctcgggccacctgaccttcgtaacctgcactcaggtcagagccccagaccccccgcgggcgcgggagacgtgccgcccgcccgacccccgcccgcccgacccccgcccgcccgacccccgcccgcccgacccccgcccgcccgacccccgcccgcccgacccccgcccgcccgacccccgcccgcccgacccccgcccgcccgacccccgcccgcccgacccccgcccgcccgacccccgcccgcccgacccccgcccgcccgacccccgcccgcccgacccccgcccgcccgacccccgcccgcccgacccccgaataaaccacacaaggcggtacgttttcgtctgtctcgttctttatttctcacacacgcgcgcggccatcgccgcgtctgtcttaaaggcgcacagacgcccgattccttccccctctccccatctcccccctcccccgctcccggaagtttccccccccgtcactccccaaacagtccgtcgtcgtcgtcctccagctccgcgtccatgtccacgggctcgcgcctcggcggcgtggccagccccgcggcggtccccaccacctccacgccgccgcccgccgcggccagcaccgtccccgcgcggcccgcggccgacgcccagcgtatctgcgggggcgggcccgcgtccgcgtcgtcgcgcagcaccagcgggggcgcgtcgccgtcgggctcgagcagcgcccgcgcgcagaactcccgccgcggcccgcgcagctccgccgggccgccgcgcacggcgtcgcgccccagcgccacgtagacgggccgcagcggcgcgcccaggccccagcgcgcgcaggcgcggtgcgagtgcgcctcgtcctcgcagaagtccggcgcgccgggcgccatggcgtcgcccgcgcccgaggcggcggcccggccgtccagcgccgggagcacggcgcggcggtactcgcgcggggacatgggcaccagcgtgtcggggccgaagcgcgtgcgcacgcggtaccgcacgttggccccgcggcagaggcgcagcggcggcgcgtcggggtacaggcgcgcgtgcgcggcctccacgcgcgcgaagacccccggcccgaacacgcggccggaggccagcacggtgcggcgcaggtcccgcgccgccggccagcgcacggcgcactgcacggcgggcagcacctcgcaggccaggtaggcgtgctgccgcgagaccacgggcccgtcggcgggccagtccgcggcgcgcacggcgttgacgacgatgaggcggcggtcgcaggcgccggccagcagccccaggaactccacggcgccggcgaaggccaggtcccgcgtggacagcagcagcacgccctgcgcgcccagcgccgagacgtcgggggcgccggtccagttgcccgcccaggcggccgtggcgggcccgcagagccggttgcccagggccgccagcaggcaggacagcccgccgcgctcggcggaccactccggggggggcccgcccccggcgcggcccgcggccaggtcctcgcccggcagcggcgagtagaggatcaccacgcgcacgtcctccgggtcgggcacctggcgcatccaggccgccgcgcggcgcagcgggcccgaggcgcgcagcgggccgaaggcggcgggcgcgccgccggggggcggggcggcgcagcgcgcggccagcgaggccagcgcgcgcgggtcgaacatgagggccgggcgccacggcgcggggaagagcgggtggtccgtgagctcggccacggcccgcggggcgcagtaggcctccagggcggcggccgagggcgccggcgtgtggctgggccccggcggctggcggcgccagccgccctgcgggtcggggccctcggcgggccggcgggtcagcgccgcggggcgcggcggccgcggcggcggcgtcggcggggcggggggcgcggcccccgcgggaggggcggccgcggggcggggggcgtccgcgcggctcttcttcggggggcgcggggcgccgcccggcggcgccctggccggggcggggctcttgcgcttgcgcgcctcccgcggcgcggaggcgggcgcggcgagcgagtcggccgcggcgacggtgtcggccagcagggggcgcaggctctggttctggaagagcaggtccgcggcggcggcggcggcggagctcagcaggcgcgggctccgcggcagcgccgggcccagggccccggcgaccaggctcacggcgcgcacggcggccacggcggcctcgctgccgccggccacgcgcaggtccccgcgcaggcgcatcagcaccagcgcgtcgcgcacgaaccgcagctcgcgcagccaggcgcgcaggcggggcgcgtcggcgtgcggcggggcggccgcgcccgcgggccccgggcgcgggggcgcggcgggccgggctccggccagccccggcacggccgccaggtcgccgtcgaagccctccgccagcgcctccaggatcccgcggcaggcggccaggcactccacggccacgcggcccgcctccgcgcgccggccgccgccaccaccgccggcgccgtcgtcgtcgtcgtcgtcgtcggccccggccggcgcggaggcgggcgcggcgctcaggcgccccagggcggcgagcacccccgcggcgccgtagccggcgggcaccgcgcgctcgtcggccggcgacgccgccgccgacggcaacggggcggcggcggcggcgggcttcccgcgggcgtcgtcgccgtcgtggcggttggcgtcgccgccgtcgtcgggggttcgcgccccggtcagcgccgcgttctcgcgcgccagcaggggcgcgtaggcgcggcgcaggctggtcagcaggaagcccttctgcgcgcggtcgtagcggcggctcatggccacggcggccgccacgtgcgccaggccccagccgaagcggcccgccgccatggcgtaccccaggtggggcacggcccgcgccacgctgccggagatgaaggagctgctgttgcgcgccgcgcccgagatccggaagcaggcctggtccagcgccacgtccccgggcgccacgcgcgggttctggagccaccccatcgcctccgcgtccggcgtgtacagcagccgcgtgatcagggcgtactgctgcgccgcgtcgcccagctcgggcgcccacacgggcgccggggcgcccgaggcctcgaaccgggcccgcgcctcctccgcctcgggcgccccccagaggccggggcggctgtcgcccagcccgccgtacagcacgcgccccgggggcggggggccggccccgggccacggctccccgctgacgtacccgtcgcggtagcgcgcgtagaaggcgccggaggccgcgtcggcgtccagctcgacccgccggggccgcccggccgtgaagcggcccgtggcgtcgcggccggccaccgccgcgcgggcccggcggcgctccaggcggcccgcggtcgccgcgggggtccgggccggggcgggctcggccctgggcgggctcggccggggcgccgcccccggggccctcgcgggcacccccgcctcctcgtcgtccgcgccgagggtcccgcccgcggcgtggtctgcggcgctggcgggggcgcgggcggcgtcgtcgtcgtcgtcgtcgtcagacgaggaggcggatgcagacgaggaggaggaggcggaggaggaggcggaggacgccgacgacgaggatccggattttgatgagtcagaggcggccgagcgccggcggggggcgcgccggcggcggtggtggtggtggtggtggtgtcggcggggcgccgggggtcgcggcgacaggctggccatggggtccgggtacgccccgcggaccgcggacgtcgtctccggtccgcggacccagcggcccgcgtcgcggtcgtcgtcatcgtcgtcgtcgtcgtcgtcgtcgttctcctcgccataatcggcgcgcatggagggggtccgcggcggagaaggcgagcgggccgcttcttcttgcgcgccgtcgcgctccggggggggcgacgggatcgtgcgaacggcctcgtccaccatcgaggccagcagggccagctgccgcggcgagacgacgccgtccgcggcaggctcgtcgacggcctccccggacgccggggccgcctcgtcggcatcggcatcggcggcggcgtcgtcggcctcgtcttcgttctcctccggcccaccgtgccacccgaacccgggccgcgcggcggggcgacggtccgggttcggggtgggcggcggtccgtcggctggatccggagatccggggccgccggtcgtctccgccgcggcccggagacgtcccccgtcctcgtccgccatcgcgacctcggccccgcggccctgcgtcgtcgtcgtcgtcttcttcttcttccgctgctccgccgacatcgcctccgaccggggtgtgcggggggggggtcttcttcttcttcttcaggggcggcagtgggggggggtggttggcagtctctctcccccccgtgcggtgcgtgcgtgtgcctgtgtcttttcgcctctccgcgccgatcgggtagatcctggcggccgcgtcggtagccgcgctccgtgtggacgatcgccccgtcgcctggctgatatagtcctcggggcgcgcggggcggggggaaaggaggaggacgcggaggaggagcgatcgacgccgccgcgccccggctcgccggggttccgcccccaggtggaaccgcattatgcgcggccccgccccgacgcccgcgcgtccgcgtccgtggcggcggcccgttggtcgcgccgccgccgctccgcccgcgcggcatctcattagcgcccggcgcgggcggcttccgcttccgcccgcgatgctaatgagaccctcgtcgcgggcgggctcgctcccctgcccttccgggttcgtggtaatgagatgccggccccgcgctcccgttggcccccgccggccccaaaggggccggcgaggtcgccccgttggtccgcgggcggctccgccccaaagggggcggggccgcagggtaaaagaagtgagaacgcgaagcgttcgcacttcgtcctaatagtatatatattattagggcaaagtgcgagcgctggcgccctgcccggggcccgcgtcatcccgcgctccgccccaaagggggcggggccgcagggtaaaagaagtgagaacgcgaagcgttcgcacttcgtcctaatagtatatatattattagggcaaagtgcgagcactggcgccctgcccggggcccgcgtcatcccgcgggctccgccccgaggcgggcccggacggggggcgggccgttcctcgcgcacataaagggccggcgtcccggtcgccgccgcaccaggggcacaccggctgcgcggcggagaccgggacggcagcggcggcatcgcgaagggggccacagcgagacagagacgccggcggcgagcggggcaccgacgcacccggatcggatcggatacagagacgcgggcgcatcggttccttttcgttctgcctttccctcccccccccccccccccaccctgtacgtaccgcgaggacccatccacccactgcagccttatcgcaggtacggtgacccggggggccggccggggggacgggcgggggacggggggacgggccggggggacgggccggggggacgggccggggggacgggccggggggacgggccggggggacgggccggggggacgggccggggggacgggccggggggacgggccggggggccggggggccggggggccggggggccggggggacggggggacggggggacggggggacggggggacggggggacggggggacggggggacggggggacggggggacggggggacggggggacggggggacggggggacggggggacggggggacggggggacgggccggggggacggggggacgggccggggggacggggggacgggccggggggacggggggacgggccggggggacggggggacgggccggggggacggggccccgatcccaacatccgcgctttctcgcaggccgggcgccgccttcgtggacgggacaccggtgtggtaactggcgacaaggcgttgccactatggcagacatccccccggacccgcccgcgctcaacacgacgcctgcgaatcatgctcccccatccccacccccgggttcacggaagcgcagacgccccgtcctccccagctcgtcggaatctgagggtaagcccgacacagaatcggaatcctcctcgaccgagtcgtccgaggatgaggcgggagacctacgcggcgggcgccgtcgctccccgcgggagctcggggggaggtattttttggatctgtcggcagaatcgaccacggggacggaatcggagggaacggggccgtcggacgacgatgatgatgatgcgtcagacggctggttggttgacacacccccccgcaaatccaagcgaccccgaatcaacctgcgattaacgagctcccccgaccggcgtgcgggtgtggttttccccgaggtgtggagaagcgacagacctatccgcgcggcgcaaccccaggccccggccagtcttccggggatcgcgcacgcgcaccggcgctctgctcgccaggcccagatgcggagcggagccgcctggacgcttgatctgcattacatacgccagtgcgtcaaccagctctttcggatcctgcgtgccgccccgaacccgcccggcagcgccaaccgcctgcgccacctggtgcgagactgctacctcatgggctactgccggacccgcctggggccgcgcacgtggggccgcctgctgcagatctcgggcggaacctgggacgtgcgcctgcgaaacgcaatccgggaggtcgaggcgcattttgaacccgccgccgagcccgtgtgcgagctgccctgtctgaacgccaggcgttacggccccgagtgtgatgttggcaatctcgagaccaacggcggctcgacgagcgatgatgagatatcggatgcgacggactcggacgataccctcgcgtcccattccgacacggagggggggccctccccggccggccgggagaacccggaatccgcgtccggcggggctatcgcggctcggctggagtgtgagtttgggacgtttgactggacgtccgaggagggctcccagccctggctgtccgcggtggtcgccgataccagctccgccgaacgctctggcctacccgccccgggcgcgtgtcgcgcaacggaagccccagaacgcgaggacgggtgccgaaaaatgcgcttccccgccgcctgcccctatccctgcggccacacatttctccggccatgagcgcgggacccccagcccggtgtgtttgccaaacgaaaaataaacgccctacaagaaagcttttgtgtctgagtgtctggtttttctgggggtggaggaaggaacgacaaaaaaaagaaacaaacgcgacaccgctcgtacgtgtaatggggccgcagtgttttttattagcatcggggggggttagaggttggtgattggatagcaaacgtgggatgacggaggccactcgtcgccaacggccagcgggggcccggggttctgggggtcatcgtcccccgtctgccaggagggctcatcgggaatctcgggtcgccccatgcacgtaaaacacgggcgctgcgtggggtgggtcgccggatgcgggcgggatgatgcggggcggggtttgttgtgaggagccacgagggaccgtagccagcgaagacagctgcgttcccggtcgccgggcaccaccacgccgtattggtattcgtatcggctaaggagattttccagggggtgattaggcgctgcggggaacggggtccacgacacggtccgctcgggcaaaaaccgatcgggcaggggccacggttcccccacccacgcgtcgttggtcttcgtggcgatgaagcgaaaccccagccgggttttttgtgcgtactcgaaaaacggcacacacaggtccgccgccccgaccacccacaggtggtatagccggtgggggccggggcgctcttgatgcaggagccgaaaacacgcaggggcatccagaatctcgatgctttccagggggtcgtcctccgcaaacaggcccgtcgtggtgtttgggggacagcgacaggagcgggttcgcacgatcggtcgggtgaatttgggcaagtccatcagaggctcggccagcctgcgaaggttcgccgggcgaaccaccaccggggttcccagaggctcggaggccaggatccggcattgccgaagcagaaaactccacagagccgggcttgcgtcagcggaagtccgcggcagggcgtttcgttggtctaggagggtaaccacacttacaacaacaacgcccatgtcggtatattaggcccgtggtccgatcttcactcactcgcctgtctgcggacctatgcacggcgggacggcgcgcggacccgggggggctgcttgctatcacacggcccgttcgcacgttcgattttttcagccttgtttggttggctaggtatcccggataatctgacgttccggatatagggggcggggggtagtggggggtgtgtcgacaaactgccgcttcttaaaacaccggggcccgtcgctcggggtgctcgttggttggcacgcgcgacgcggcaaatggcctgtcgtaagttctgtggggtctaccgtagacccgacaagagacaggaggcgtccgtcccgccggagacaaacacggccccggccttcccggcgagcaccttttatacccccgcggaggatgcgtacctggcccccgggcccccggaaaccatccacccttcccgcccaccgtcccccggcgaggctgcgcgcctgtgtcagctgcaggagatcttggcccagatgcacagcgacgaggactaccccatcgtggacgccgcgggtgcggaggaggaagacgaggccgacgatgacgccccggatgacgtggcctacccggaggactacgcggaggggcgttttctgtccatggtttcggccgcccccctgcccggagccagcggccatcctcctgttccgggccgcgcagccccccccgacgtccggacctgcgacacgggtaaggtgggggccacggggttcaccccggaagagctcgacaccatggaccgggaggcacttcgggccatcagccgcgggtgcaagcccccttcgaccctggcaaaactggtgaccgggctgggattcgcgatccacggagcgctcatcccggggtcggaggggtgtgtctttgatagcagccacccgaactaccctcatcgggtaatcgtcaaggcggggtggtacgccagcacgagccacgaggcgcggctgctgagacgcctgaaccaccccgcgatcctacccctcctggacctgcacgtcgtttctggggtcacgtgtctggtcctccccaagtatcactgcgacctgtatacctatctgagcaagcgcccgtctccgttgggccacctacagataaccgcggtctcccggcagctcttgagcgccatcgactacgtccactgcaaaggcatcatccaccgcgatattaagaccgagaacatcttcatcaacacccccgagaacatctgtctgggggactttggggcggcgtgctttgtgcgcgggtgtcgatcgagccccttccattacgggatcgcaggcaccatcgatacaaacgcccccgaggtcctggccggggatccgtacacccaggtaatcgacatctggagcgccggcctggtgatctttgagaccgccgtccacaccgcgtccttgttctcggccccgcgcgaccccgaaaggcggccgtgcgacaaccagatcgcgcgcatcatccgacaggcccaggtacacgtcgacgagtttccgacgcacgcggaatcgcgcctcaccgcgcactaccgctcgcgggcggccgggaacaatcgtccggcgtggacccgaccggcgtggacccgctactacaagatccacacagacgtcgaatatctcatatgcaaagcccttacctttgacgcggcgctccgcccaagcgccgcggagttgctgcgcctgccgctatttcaccctaagtgaccccgctccccccggggggcgtggaggggggggctggttggatgtttttgcacaaaaagacgcggccctcgggctttggtgtttttggcaccttgccgcccggcgtcatgcacgccatcgctcccaggttgcttcttctttttgttctttctggtcttccggggacacgcggcgggtcgggtgtccccggaccaattaatccccccaacagcgatgttgttttcccgggaggttcccccgtggctcaatattgttatgcctatccccggttggacgatcccgggcccttgggttccgcggacgccgggcggcaagacctgccccggcgcgtcgtccgtcacgagcccctgggccgctcgttcctcacgggggggctggttttgctggcgccgccggtacgcggatttggcgcacccaacgcaacgtatgcggcccgtgtgacgtactaccggctcacccgcgcctgccgtcagcccatcctccttcggcagtatggagggtgtcgcggcggcgagccgccgtccccaaagacgtgcgggtcgtacacgtacacgtaccagggcggcgggcctccgacccggtacgctctcgtaaatgcttccctgctggtgccgatctgggaccgcgccgcggagacattcgagtaccagatcgaactcggcggcgagctgcacgtgggtctgttgtgggtagaggtgggcggggagggccccggccccaccgcccccccacaggcggcgcgtgcggagggcggcccgtgcgtccccccggtccccgcgggccgcccgtggcgctcggtgcccccggtatggtattccgcccccaaccccgggtttcgtggcctgcgtttccgggagcgctgtctgcccccacagacgcccgccgcccccagcgacctaccacgcgtcgcttttgctccccagagcctgctggtggggattacgggccgcacgtttattcggatggcacgacccacggaagacgtcggggtcctgccgccccattgggcccccggggccctagatgacggtccgtacgcccccttcccaccccgcccgcggtttcgacgcgccctgcggacagaccccgagggggtcgaccccgacgttcgggccccccgaaccgggcggcgcctcatggccttgaccgaggacacgtcctccgattcgcctacgtccgctccggagaagacgcccctccctgtgtcggccaccgccatggcaccctcagtcgacccaagcgcggaaccgaccgcccccgcaaccactactccccccgacgagatggccacacaagccgcaacggtcgccgttacgccggaggaaacggcagtcgcctccccgcccgcgactgcatccgtggagtcgtcgccactccccgccgcggcggcggcaacgcccggggccgggcacacgaacaccagcagcgcctccgcagcgaaaacgccccccaccacaccagcccccacgacccccccgcccacgtctacccacgcgaccccccgccccacgactccggggccccaaacaacccctcccggacccgcaaccccgggtccggtgggcgcctccgccgcgcccacggccgattcccccctcaccgcctcgccccccgctaccgcgccggggccctcggccgccaacgtttcggtcgccgcgaccaccgccacgcccggaacccggggcaccgcccgtacccccccaacggacccaaagacgcacccacacggacccgcggacgctccccccggctcgccagcccccccaccccccgaacatcgcggcggacccgaggagtttgagggcgccggggacggcgaaccccccgaggacgacgacagcgccaccggcctcgccttccgaactccgaaccccaacaaaccaccccccgcgcgccccgggcccatccgccccacgctcccgccaggaattcttgggccgctcgcccccaacacgcctcgcccccccgcccaagctcccgctaaggacatgccctcgggccccacaccccaacacatccccctgttctggttcctaacggcctcccctgctctagatatcctctttatcatcagcaccaccatccacacggcggcgttcgtttgtctggtcgccttggcagcacaactttggcgcggccgggcggggcgcaggcgatacgcgcacccgagcgtgcgttacgtatgtctgccacccgagcgggattagggggtgggggtggggggcgagaaacgatgaaggacgggaaagggaacagcgaccaaatgtcacgataagaacaataaacctgtgacgtcaatcagatatgtgagtttggttgtgttttgtgggactgggggcggggggtgggaggtatcagtgggtgacagagtcttttaaaagacgtgtcccggggccctcgagatgcgcaacttttggccacacagagaaaggcccccagacgaagtcacccgggtccccgaacaaaaacaaaaaccttgaccgccgccggggggcgtgcctgttgttttggtctcaatggatcggtatgccgttcggacctgggggattgtgggaatcctcgggtgtgctgctgttggggccgcacccaccggccccgcgtccgatacaacaaacgcgaccgcacgcctccccacgcaccccccactcatccgttccgggggctttgccgtccccctcatcgtgggggggctgtgtctcatgattctggggatggcgtgtctactcgaggtcctgcgtcgcctgggtcgcgagttggcgaggtgctgcccccacgcgggccaatttgccccatgatttttcgcctttctggccttgcccccaccccatcgccccgattgtgtgtcgggtgcccggggtacagcagctatggagcggtcggtaatataactttggttgtcgccacacgccccgtgccgggcatgggttgtgcgggaaggacgaaataatccggcgatccccaagcgtaccaactgggggggggggggggggggaaaagaaactaaaaacacatcaagcccacaacccatcccacaatgggggttatggcggacccaccgcaccaccatactccgattcgaccacatatgcaaccaaatcacccccagaggggaggttccatttttacgaggaggaggagtataatagagtctttgtgtttaaaacccggggtcggtgtggtgttcggtcataagctgcattgcgaacgactagtcgccgtttttcgtgtgcatcgcgtatcacggcatggggcgtttgacctccggcgtcgggacggcggccctgctagttgtcgcggtgggactccgcgtcgtctgcgccaaatacgccttagcagacccctcgcttaagatggccgatcccaatcgatttcgcgggaagaaccttccggttttggaccagctgaccgacccccccggggtgaagcgtgtttaccacattcagccgagcctggaggacccgttccagccccccagcatcccgatcactgtgtactacgcagtgctggaacgtgcctgccgcagcgtgctcctacatgccccatcggaggccccccagatcgtgcgcggggcttcggacgaggcccgaaagcacacgtacaacctgaccatcgcctggtatcgcatgggagacaattgcgctatccccatcacggttatggaatacaccgagtgcccctacaacaagtcgttgggggtctgccccatccgaacgcagccccgctggagctactatgacagctttagcgccgtcagcgaggataacctgggattcctgatgcacgcccccgccttcgagaccgcgggtacgtacctgcggctagtgaagataaacgactggacggagatcacacaatttatcctggagcaccgggcccgcgcctcctgcaagtacgctctccccctgcgcatccccccggcagcgtgcctcacctcgaaggcctaccaacagggcgtgacggtcgacagcatcgggatgctaccccgctttatccccgaaaaccagcgcaccgtcgccctatacagcttaaaaatcgccgggtggcacggccccaagcccccgtacaccagcaccctgctgccgccggagctgtccgacaccaccaacgccacgcaacccgaactcgttccggaagaccccgaggactcggccctcttagaggatcccgccgggacggtgtcttcgcagatccccccaaactggcacatcccgtcgatccaggacgtcgcgccgcaccacgcccccgccgcccccagcaacccgggcctgatcatcggcgcgctggccggcagtaccctggcggtgctggtcatcggcggtattgcgttttgggtacgccgccgcgctcagatggcccccaagcgcctacgtctcccccacatccgggatgacgacgcgcccccctcgcaccagccattgttttactagaggagtttccccgctcccgtgtacctctgggcccgtgtgggagggtggctggggtatttgggtgggacttggactccgcataaagggagtctcgaaggagggaaactaggacagttcataggccgggagcgtggggcgcgcaccgctgtcccgacgattagccaccgcgcccacagccacctcgacccgtccgatcccggtatgcccggccgctcgctgcagggcctggcgatcctgggcctgtgggtctgcgccaccggcctggtcgtccgcggccccacggtcagtctggtctcagactcactcgtggatgccggggccgtggggccccagggcttcgtggaagaggacctgcgtgttttcggggagcttcattttgtgggggcccaggtcccccatacaaactactacgacggcatcatcgagctgtttcactaccccctggggaaccactgcccccgcgttgtacacgtggtcacactgaccgcatgcccccgccgccccgccgtggcgttcaccttgtgtcgctcgacgcaccacgcccacagccccgcctatccgaccctggagctgggtctggcgcggcagccgcttctgcgggttcgaacggcaacgcgcgactatgccggtctgtatgtcctgcgcgtatgggtcggcagcgcgacgaacgccagccggtttgttttgggggtggcgctctctgccaacgggacgtttgtgtataacggctcggactacggctcctgcgatccggcgcagcttcccttttcggccccgcgcctgggaccctcgagcgtatacacccccggagcctcccgacccacccctccacggacaacgacacccccgtcctccccccgagacccgacccccgcccccggggacacagggacgcccgcgcccgcgagcggcgagatagccccgcccaattccacgcgatcggccagcgaatcgagacacaggctaaccgtagcccaggtaatccagatcgccataccggcgtccatcatcgcctttgtgtttctgggcagctgtatctgcttcatccatagatgccagcgccgatacaggcgcccccgcggccagatttacaaccccgggggcgtttcctgcgcggtcaacgaggcggccatggcccgcctcggagccgagctgcgatcccacccaaacaccccccccaaaccccgacgccgttcgtcgtcgtccacgaccatgccttccctaacgtcgatagctgaggaatcggagccaggtccagtcgtgctgctgtccgtcagtcctcggccccgcagtggcccgacggccccccaagaggtctaggtccaagcgggccgttcggcaggcccgccccaccgcccccatcgtggttatttccccccccccccccccaataaaccgatgttatttgcctatatgcgtgtgttggatccctttgtgatcgttcgtcattccccggatggcatgggaggcgggtaatggatgggcggggcccggggggaggaaaaagaataaagggggtagtgtcggagaggcccgccgcgcatttaaggagtcgccgccccgactctgtgtcttcgggtgacttggtgcgccgccgtcagctagtctccgatctgccccgaccgacggctcctgccacccgaacatggctcgcggggccgggttggtgttttttgttggagtttgggtcgtatcgtgcctggcggcagcacccagaacgtcctggaaacgggtaacctcgggcgaggacgtggtgttgcttccggcgcccgcggaacgcacccgggcccacaaactactgtgggccgcggaacccctggatgcctgcggtcccctgcgcccgtcgtgggtggcgctgtggcccccccgacgggtgctcgagacggtcgtggatgcggcgtgcatgcgcgccccggaaccgctcgccatagcatacagtcccccgttccccgcgggcgacgagggactgtattcggagttggcgtggcgcgatcgcgtagccgtggtcaacgagagtctggtcatctacggggccctggagacggacagcggtctgtacaccctgtccgtggtcggcctaagcgacgaggcgcgccaagtggcgtcggtggttctggtcgtggagcccgcccctgtgccgaccccgacccccgacgactacgacgaagaagacgacgcgggcgtgacgaacgcacgccggtcagcgttccccccccaaccccccccccgtcgtccccccgtcgcccccccgacgcaccctcgtgttatccccgaggtgtcccacgtgcgcggggtaacggtccatatggagaccctggaggccattctgtttgcccccggggagacgtttgggacgaacgtctccatccacgccattgcccacgacgacggtccgtacgccatggacgtcgtctggatgcggtttgacgtgccgtcctcgtgcgccgatatgcggatctacgaagcttgtctgtatcacccgcagcttccagagtgtctatctccggccgacgcgccgtgcgccgtaagttcctgggcgtaccgcctggcggtccgcagctacgccggctgttccaggactacgcccccgccgcgatgttttgccgaggctcgcatggaaccggtcccggggttggcgtggctggcctccaccgtcaatctggaattccagcacgcctccccccagcacgccggcctctacctgtgcgtggtgtacgtggacgatcatatccacgcctggggccacatgaccatcagcaccgcggcgcagtaccggaacgcggtggtggaacagcacctcccccagcgccagcccgagcccgtcgagcccacccgcccgcacgtgagagccccccatcccgcgccctccgcgcgcggcccgctgcgcctcggggcggtgctgggggcggccctgttgctggccgccctcgggctgtccgcgtgggcgtgcatgacctgctggcgcaggcgctcctggcgggcggttaaaagccgggcctcggcgacgggccccacttacattcgcgtggcggacagcgagctgtacgcggactggagttcggacagcgagggggagcgcgacgggtccctgtggcaggaccctccggagagacccgactctccctccacaaatggatccggctttgagatcttatcaccaacggctccgtctgtatacccccatagcgaggggcgtaaatctcgccgcccgctcaccacctttggttcgggaagcccgggccgtcgtcactcccaggcctcctatccgtccgtcctctggtaaggcgtcttccgacgacgcggacgtcggcgatgaactgattgccatcgcggacgcacgcggggacccgccagagaccctgccccccggcgcgggcggcgccgcgcccgcgtgccgcagaccacctcgcggcggctcccccgcggcctttcccgtggccctccacgccgtggacgccccctcccaattcgtcacctggctcgccgtgcgctggctgcggggggcggtgggtctcggggccgtcctgtgcgggattgcgttttacgtgacgtcaatcgcccgaggcgcataaaggtccggcggccaccccgccgcagctcataaaaatcgtgagtcacggcaaccccaccttcgcctccgccctccgccagcgcccttccgcgtccgcgatgacctcccggcccgccgaccaagactcggtgcgttccagcgcgtcggtgccgctttaccccgcggcctcgcccgtcccggcagaagcctactactcggaaagcgaagacgaggccgccaacgacttcctcgtgcgcatgggccgccagcagtcggtcctaaggcgccgacggcggcgcacgcggtgcgtcgggctggttatcgcctgtctcgtcgtggccctcctatctggagggttcggggcacttttggtgtggctgctccgctaaatgacgcctcgatgtatggcgccttcttcgcccccacccctcgccgcgacccacgtccgtatgttaattgcaataaagtggttgattgtcattacggtctactaggttgtcttttttttttgggggggggggaggaaatgcagaaaagggtaagaaattctcggaatttcacccccgggggggggcaagtgcagtaacccagttcctcagtgtttgggaaatctattgaactctcccggctcctccgtgttagggaagtctcttggggaaatctattgacctctcgcccccccccccccaggaggggggcagtgcagtaccccagttcctccgtgctggggaaatctctctgccgggtacgggctccagacgaaggacccatacatttccccatccgcaccccacatctggcgttctagagtcacgacgcatttgcccccgtccccgcagcaacacacaaagcgatttcaattttcacgattttattattaattacaccaaccaccctgtccccgggacgtggtcaggaccgggggtccgcacccaaacgcacgaaacaaatgctggcagtgtgccgaatataaccccgcgtaggaacacgtcgacgcgtgcgccaaacagcaccagaaggcgcatgccatcagcaggtcgtgcatatggcgatgtgtttggacgcagggcgcagccgcggcgataaaattcatggcggccgtccgccagggccacagcggcgaggactccctgttggcccgaagccattgggtatgaaccagctgcgcctcctgtccgaccctggctcccgccagcgggggcggtgggtcgtgggtgttgagagcacacaggcgggacacctcgatcaccgtccgaaaaaaggcccggtggtccgcgggcagcatctgcaggtgcgccagggcctgggcgttgagagggtacaactcggagccgggggactccgggggccggtccgcgcggtgccgcgagttggcacgctttggggcccgggtgtcggacgcgggcgcgttatggatcccgacgcggggcagaacgtacgtgcgttggcgcggcgatgaggggtccgggctgccgaggggggcgtaggggaccgggctaggcaagcccgcgggttgcgcggggttcccgtgggggtctaggctccctgggcacccgtgggggtcgtgggggtcgcgggtccctgggtatgcgcgggaccctgggttctctgggagatcgtggaactcgcggttccctgggctctcggggaacccggggctccctggggacacgtggtgccctgggaattcttgatggtcggacggcttcagatggcttcgggatcgagagggccgcacagactcgtagtagacccgaatctccacgtttccccgccgccggatcatggtcgccgccccggtgcgggggcccgtcggtcggaagcgagtgcccttcaagcgtgtccgctcctctgggctgcatgccgtcggatggggtgccttttaaggaaaggtctcggctgcccgccccaaccggggtttgggggtgggccggggaaaccccggatgccatgggggggtcacaccctaagcgccggcgcgctggttgggtgggggtagaggggagtccccggtcgacgagatcgtatcaaggggccagcacgcgatcctgccgctcgttcgatctagcacacccacgggtctgctgtgtgggatttcgactcgcgggatccgatcgcacgtccggaggacacagcagcgggagctccgggtcggtcaccgcagttctggccgcctctcggtcctcccgttcccttttatggatctccgcgcagacatcgccatacgtccggtgtgtgcaccgcgaagaatccagaaacatgtccgtcgttttcagggcccaagacatggtgtcccgtccacgaaggcggcgcccggcctgcgagaaagcgcggatgttgggatcggggccccgtccccccggcccgtccccccgtccccccggcccgtccccccgtccccccggcccgtccccccgtccccccggcccgtccccccgtccccccggcccgtccccccgtccccccgtccccccgtccccccgtccccccgtccccccgtccccccgtccccccgtccccccgtccccccgtccccccgtccccccgtccccccgtccccccgtccccccgtccccccgtccccccggccccccggccccccggccccccggccccccggcccgtccccccggcccgtccccccggcccgtccccccggcccgtccccccggcccgtccccccggcccgtccccccggcccgtccccccggcccgtccccccggcccgtccccccgtcccccgcccgtccccccggccggccccccgggtcaccgtacctgcgataaggctgcagtgggtggatgggtcctcgcggtacgtacagggtgggggggggggggggggagggaaaggcagaacgaaaaggaaccgatgcgcccgcgtctctgtatccgatccgatccgggtgcgtcggtgccccgctcgccgccggcgtctctgtctcgctgtggcccccttcgcgatgccgccgctgccgtcccggtctccgccgcgcagccggtgtgcccctggtgcggcggcgaccgggacgccggccctttatgtgcgcgaggaacggcccgccccccgtccgggcccgcctcggggcggagcccgcgggatgacgcgggccccgggcagggcgccagtgctcgcactttgccctaataatatatatactattaggacgaagtgcgaacgcttcgcgttctcacttcttttaccctgcggccccgccccctttggggcggagcgcgggatgacgcgggccccgggcagggcgccagcgctcgcactttgccctaataatatatatactattaggacgaagtgcgaacgcttcgcgttctcacttcttttaccctgcggccccgccccctttggggcggagccgcccgcggaccaacggggcgacctcgccggcccctttggggccggcgggggccaacgggagcgcggggccggcatctcattaccacgaacccggaagggcaggggagcgagcccgcccgcgacgagggtctcattagcatcgcgggcggaagcggaagccgcccgcgccgggcgctaatgagatgccgcgcgggcggagcggcggcggcgcgaccaacgggccgccgccacggacgcggacgcgcgggcgtcggggcggggccgcgcataatgcggttccacctgggggcggaaccccggcgagccggggcgcggcggcgtcgatcgctcctcctccgcgtcctcctcctttccccccgccccgcgcgccccgaggactatatcagccaggcgacggggcgatcgtccacacggagcgcggctaccgacgcggccgccaggatctacccgatcggcgcggagaggcgaaaagacacaggcacacgcacgcaccgcacgggggggagagagactgccaaccacccccccccactgccgcccctgaagaagaagaagaagaccccccccccgcacaccccggtcggaggcgatgtcggcggagcagcggaagaagaagaagacgacgacgacgacgcagggccgcggggccgaggtcgcgatggcggacgaggacgggggacgtctccgggccgcggcggagacgaccggcggccccggatctccggatccagccgacggaccgccgcccaccccgaacccggaccgtcgccccgccgcgcggcccgggttcgggtggcacggtgggccggaggagaacgaagacgaggccgacgacgccgccgccgatgccgatgccgacgaggcggccccggcgtccggggaggccgtcgacgagcctgccgcggacggcgtcgtctcgccgcggcagctggccctgctggcctcgatggtggacgaggccgttcgcacgatcccgtcgccccccccggagcgcgacggcgcgcaagaagaagcggcccgctcgccttctccgccgcggaccccctccatgcgcgccgattatggcgaggagaacgacgacgacgacgacgacgacgatgacgacgaccgcgacgcgggccgctgggtccgcggaccggagacgacgtccgcggtccgcggggcgtacccggaccccatggccagcctgtcgccgcgacccccggcgccccgccgacaccaccaccaccaccaccaccgccgccggcgcgccccccgccggcgctcggccgcctctgactcatcaaaatccggatcctcgtcgtcggcgtcctccgcctcctcctccgcctcctcctcctcgtctgcatccgcctcctcgtctgacgacgacgacgacgacgacgccgcccgcgcccccgccagcgccgcagaccacgccgcgggcgggaccctcggcgcggacgacgaggaggcgggggtgcccgcgagggccccgggggcggcgccccggccgagcccgcccagggccgagcccgccccggcccggacccccgcggcgaccgcgggccgcctggagcgccgccgggcccgcgcggcggtggccggccgcgacgccacgggccgcttcacggccgggcggccccggcgggtcgagctggacgccgacgcggcctccggcgccttctacgcgcgctaccgcgacgggtacgtcagcggggagccgtggcccggggccggccccccgcccccggggcgcgtgctgtacggcgggctgggcgacagccgccccggcctctggggggcgcccgaggcggaggaggcgcgggcccggttcgaggcctcgggcgccccggcgcccgtgtgggcgcccgagctgggcgacgcggcgcagcagtacgccctgatcacgcggctgctgtacacgccggacgcggaggcgatggggtggctccagaacccgcgcgtggcgcccggggacgtggcgctggaccaggcctgcttccggatctcgggcgcggcgcgcaacagcagctccttcatctccggcagcgtggcgcgggccgtgccccacctggggtacgccatggcggcgggccgcttcggctggggcctggcgcacgtggcggccgccgtggccatgagccgccgctacgaccgcgcgcagaagggcttcctgctgaccagcctgcgccgcgcctacgcgcccctgctggcgcgcgagaacgcggcgctgaccggggcgcgaacccccgacgacggcggcgacgccaaccgccacgacggcgacgacgcccgcgggaagcccgccgccgccgccgccccgttgccgtcggcggcggcgtcgccggccgacgagcgcgcggtgcccgccggctacggcgccgcgggggtgctcgccgccctggggcgcctgagcgccgcgcccgcctccgcgccggccggggccgacgacgacgacgacgacgacggcgccggcggtggtggcggcggccggcgcgcggaggcgggccgcgtggccgtggagtgcctggccgcctgccgcgggatcctggaggcgctggcggagggcttcgacggcgacctggcggccgtgccggggctggccggagcccggcccgccgcgcccccgcgcccggggcccgcgggcgcggccgccccgccgcacgccgacgcgccccgcctgcgcgcctggctgcgcgagctgcggttcgtgcgcgacgcgctggtgctgatgcgcctgcgcggggacctgcgcgtggccggcggcagcgaggccgccgtggccgccgtgcgcgccgtgagcctggtcgccggggccctgggcccggcgctgccgcggagcccgcgcctgctgagctccgccgccgccgccgccgcggacctgctcttccagaaccagagcctgcgccccctgctggccgacaccgtcgccgcggccgactcgctcgccgcgcccgcctccgcgccgcgggaggcgcgcaagcgcaagagccccgccccggccagggcgccgccgggcggcgccccgcgccccccgaagaagagccgcgcggacgccccccgccccgcggccgcccctcccgcgggggccgcgccccccgccccgccgacgccgccgccgcggccgccgcgccccgcggcgctgacccgccggcccgccgagggccccgacccgcagggcggctggcgccgccagccgccggggcccagccacacgccggcgccctcggccgccgccctggaggcctactgcgccccgcgggccgtggccgagctcacggaccacccgctcttccccgcgccgtggcgcccggccctcatgttcgacccgcgcgcgctggcctcgctggccgcgcgctgcgccgccccgccccccggcggcgcgcccgccgccttcggcccgctgcgcgcctcgggcccgctgcgccgcgcggcggcctggatgcgccaggtgcccgacccggaggacgtgcgcgtggtgatcctctactcgccgctgccgggcgaggacctggccgcgggccgcgccgggggcgggccccccccggagtggtccgccgagcgcggcgggctgtcctgcctgctggcggccctgggcaaccggctctgcgggcccgccacggccgcctgggcgggcaactggaccggcgcccccgacgtctcggcgctgggcgcgcagggcgtgctgctgctgtccacgcgggacctggccttcgccggcgccgtggagttcctggggctgctggccggcgcctgcgaccgccgcctcatcgtcgtcaacgccgtgcgcgccgcggactggcccgccgacgggcccgtggtctcgcggcagcacgcctacctggcctgcgaggtgctgcccgccgtgcagtgcgccgtgcgctggccggcggcgcgggacctgcgccgcaccgtgctggcctccggccgcgtgttcgggccgggggtcttcgcgcgcgtggaggccgcgcacgcgcgcctgtaccccgacgcgccgccgctgcgcctctgccgcggggccaacgtgcggtaccgcgtgcgcacgcgcttcggccccgacacgctggtgcccatgtccccgcgcgagtaccgccgcgccgtgctcccggcgctggacggccgggccgccgcctcgggcgcgggcgacgccatggcgcccggcgcgccggacttctgcgaggacgaggcgcactcgcaccgcgcctgcgcgcgctggggcctgggcgcgccgctgcggcccgtctacgtggcgctggggcgcgacgccgtgcgcggcggcccggcggagctgcgcgggccgcggcgggagttctgcgcgcgggcgctgctcgagcccgacggcgacgcgcccccgctggtgctgcgcgacgacgcggacgcgggcccgcccccgcagatacgctgggcgtcggccgcgggccgcgcggggacggtgctggccgcggcgggcggcggcgtggaggtggtggggaccgccgcggggctggccacgccgccgaggcgcgagcccgtggacatggacgcggagctggaggacgacgacgacggactgtttggggagtgacggggggggaaacttccgggagcgggggaggggggagatggggagagggggaaggaatcgggcgtctgtgcgcctttaagacagacgcggcgatggccgcgcgcgtgtgtgagaaataaagaacgagacagacgaaaacgtaccgccttgtgtggtttattcgggggtcgggcgggcgggggtcgggcgggcgggggtcgggcgggcgggggtcgggcgggcgggggtcgggcgggcgggggtcgggcgggcgggggtcgggcgggcgggggtcgggcgggcgggggtcgggcgggcgggggtcgggcgggcgggggtcgggcgggcgggggtcgggcgggcgggggtcgggcgggcgggggtcgggcgggcgggggtcgggcgggcgggggtcgggcgggcggcacgtctcccgcgcccgcggggggtctggggctctgacctgagtgcaggttacgaaggtcaggtggcccgagcccccccgcaggagcgggagggaaggcacggggcgcgggagggaggggctgctgcgagctcggggccgcgggcgcggggggaggggcgggggaagcccccggggcggggcgcgggggaggcggccgcgggggaggcggccgcgggaccgcagccccgtggcgcgcgggggggaggggctgccgcgagctcggcgggatggaggggagggagggggtggcggggaaccgtgtgcgggcgggcgggtgcttggtgcaactgtctggtctgcgagggcgagcggtggtgcgactggcgtcttcgggggggcggggagcttgggagtgtgtggtggtctgcggcacagcctgctagtccccgtcctgccgcgcgggggcgggcgcgggaaaaaagccgcgcgggggcgcccgcgggaaggcagccccgcggcgcgcggggggaggggcggcgcccgcgggggagcggccggctccgggggagggacggggaagggggcgcgcggggctgccctgccgcccgcccgccgccgccgcccgccttcgcgcccccccccaaaaaacaccccccccgggggttgactccccgggggaaaagaggcggggcggg

SEQ ID NO: 3 - RNA, 22 nt, Artificial Sequence
  miRNA Sequence
cuguacagccuccuagcuuucc

SEQ ID NO: 4 - RNA, 22 nt, Artificial Sequence
  miRNA Sequence
ggaaagcuaggaggcuguacag

SEQ ID NO: 5 - RNA, 21 nt, Artificial Sequence
  miRNA Sequence
cuauacaaucuacugucuuuc

SEQ ID NO: 6 - RNA, 21 nt, Artificial Sequence
  miRNA Sequence
gaaagacaguagauuguauag

SEQ ID NO: 7 - RNA, 22 nt, Artificial Sequence
  miRNA Sequence
ugagguaguagguuguauaguu

SEQ ID NO: 8 - RNA, 22 nt, Artificial Sequence
  miRNA Sequence
aacuauacaaccuacuaccuca

SEQ ID NO: 9 - RNA, 22 nt, Artificial Sequence
  miRNA Sequence
cuauacaaccuacugccuuccc

SEQ ID NO: 10 - RNA, 22 nt, Artificial Sequence
  miRNA Sequence
gggaaggcaguagguuguauag

SEQ ID NO: 11 - RNA, 22 nt, Artificial Sequence
  miRNA Sequence
ugagguaguagguugugugguu

SEQ ID NO: 12 - RNA, 22 nt, Artificial Sequence
  miRNA Sequence
aaccacacaaccuacuaccuca

SEQ ID NO: 13 - RNA, 22 nt, Artificial Sequence
  miRNA Sequence
ugagguaguagguuguaugguu

SEQ ID NO: 14 - RNA, 22 nt, Artificial Sequence
  miRNA Sequence
aaccauacaaccuacuaccuca

SEQ ID NO: 15 - RNA, 22 nt, Artificial Sequence
  miRNA Sequence
cuauacgaccugcugccuuucu

SEQ ID NO: 16 - RNA, 22 nt, Artificial Sequence
  miRNA Sequence
agaaaggcagcaggucguauag

SEQ ID NO: 17 - RNA, 22 nt, Artificial Sequence
  miRNA Sequence
agagguaguagguugcauaguu

SEQ ID NO: 18 - RNA, 22 nt, Artificial Sequence
  miRNA Sequence
aacuaugcaaccuacuaccucu

SEQ ID NO: 19 - RNA, 22 nt, Artificial Sequence
  miRNA Sequence
cuauacggccuccuagcuuucc

SEQ ID NO: 20 - RNA, 22 nt, Artificial Sequence
  miRNA Sequence
ggaaagcuaggaggccguauag

SEQ ID NO: 21 - RNA, 22 nt, Artificial Sequence
  miRNA Sequence
ugagguaggagguuguauaguu

SEQ ID NO: 22 - RNA, 22 nt, Artificial Sequence
  miRNA Sequence
aacuauacaaccuccuaccuca

SEQ ID NO: 23 - RNA, 22 nt, Artificial Sequence
  miRNA Sequence
cuauacaaucuauugccuuccc

SEQ ID NO: 24 - RNA, 22 nt, Artificial Sequence
  miRNA Sequence
gggaaggcaauagauuguauag

SEQ ID NO: 25 - RNA, 22 nt, Artificial Sequence
  miRNA Sequence
cuauacagucuacugucuuucc

SEQ ID NO: 26 - RNA, 22 nt, Artificial Sequence
  miRNA Sequence
ggaaagacaguagacuguauag

SEQ ID NO: 27 - RNA, 22 nt, Artificial Sequence
  miRNA Sequence
ugagguaguagauuguauaguu

SEQ ID NO: 28 - RNA, 22 nt, Artificial Sequence
  miRNA Sequence
aacuauacaaucuacuaccuca

SEQ ID NO: 29 - RNA, 21 nt, Artificial Sequence
  miRNA Sequence
cuguacaggccacugccuugc

SEQ ID NO: 30 - RNA, 21 nt, Artificial Sequence
  miRNA Sequence
gcaaggcaguggccuguacag

SEQ ID NO: 31 - RNA, 22 nt, Artificial Sequence
  miRNA Sequence
ugagguaguaguuuguacaguu

SEQ ID NO: 32 - RNA, 22 nt, Artificial Sequence
  miRNA Sequence
aacuguacaaacuacuaccuca

SEQ ID NO: 33 - RNA, 22 nt, Artificial Sequence
  miRNA Sequence
cugcgcaagcuacugccuugcu

SEQ ID NO: 34 - RNA, 22 nt, Artificial Sequence
  miRNA Sequence
agcaaggcaguagcuugcgcag

SEQ ID NO: 35 - RNA, 22 nt, Artificial Sequence
  miRNA Sequence
ugagguaguaguuugugcuguu

SEQ ID NO: 36 - RNA, 22 nt, Artificial Sequence
  miRNA Sequence
aacagcacaaacuacuaccuca

SEQ ID NO: 37 - RNA, 22 nt, Artificial Sequence
  miRNA Sequence
uggaauguaaagaaguauguau

SEQ ID NO: 38 - RNA, 22 nt, Artificial Sequence
  miRNA Sequence
auacauacuucuuuacauucca

SEQ ID NO: 39 - RNA, 22 nt, Artificial Sequence
  miRNA Sequence
caagcuuguaucuauagguaug

SEQ ID NO: 40 - RNA, 22 nt, Artificial Sequence
  miRNA Sequence
cauaccuauagauacaagcuug

SEQ ID NO: 41 - RNA, 22 nt, Artificial Sequence
  miRNA Sequence
aacccguagauccgaacuugug

SEQ ID NO: 42 - RNA, 22 nt, Artificial Sequence
  miRNA Sequence
cacaaguucggaucuacggguu

SEQ ID NO: 43 - RNA, 21 nt, Artificial Sequence
  miRNA Sequence
uacaguacugugauaacugaa

SEQ ID NO: 44 - RNA, 21 nt, Artificial Sequence
  miRNA Sequence
uucaguuaucacaguacugua

SEQ ID NO: 45 - RNA, 22 nt, Artificial Sequence
  miRNA Sequence
caguuaucacagugcugaugcu

SEQ ID NO: 46 - RNA, 22 nt, Artificial Sequence
  miRNA Sequence
agcaucagcacugugauaacug

SEQ ID NO: 47 - RNA, 23 nt, Artificial Sequence
  miRNA Sequence
agcuucuuuacagugcugccuug

SEQ ID NO: 48 - RNA, 23 nt, Artificial Sequence
  miRNA Sequence
caaggcagcacuguaaagaagcu

SEQ ID NO: 49 - RNA, 23 nt, Artificial Sequence
  miRNA Sequence
agcagcauuguacagggcuauga

SEQ ID NO: 50 - RNA, 23 nt, Artificial Sequence
  miRNA Sequence
ucauagcccuguacaaugcugcu

SEQ ID NO: 51 - RNA, 23 nt, Artificial Sequence
  miRNA Sequence
ucauagcccuguacaaugcugcu

SEQ ID NO: 52 - RNA, 23 nt, Artificial Sequence
  miRNA Sequence
agcagcauuguacagggcuauga

SEQ ID NO: 53 - RNA, 22 nt, Artificial Sequence
  miRNA Sequence
acggauguuugagcaugugcua

SEQ ID NO: 54 - RNA, 22 nt, Artificial Sequence
  miRNA Sequence
uagcacaugcucaaacauccgu

SEQ ID NO: 55 - RNA, 23 nt, Artificial Sequence
  miRNA Sequence
ucaaaugcucagacuccuguggu

SEQ ID NO: 56 - RNA, 23 nt, Artificial Sequence
  miRNA Sequence
accacaggagucugagcauuuga

SEQ ID NO: 57 - RNA, 22 nt, Artificial Sequence
  miRNA Sequence
cugcaauguaagcacuucuuac

SEQ ID NO: 58 - RNA, 22 nt, Artificial Sequence
  miRNA Sequence
guaagaagugcuuacauugcag

SEQ ID NO: 59 - RNA, 23 nt, Artificial Sequence
  miRNA Sequence
aaaagugcuuacagugcagguag

SEQ ID NO: 60 - RNA, 23 nt, Artificial Sequence
  miRNA Sequence
cuaccugcacuguaagcacuuuu

SEQ ID NO: 61 - RNA, 22 nt, Artificial Sequence
  miRNA Sequence
ccgcacuguggguacuugcugc

SEQ ID NO: 62 - RNA, 22 nt, Artificial Sequence
  miRNA Sequence
gcagcaaguacccacagugcgg

SEQ ID NO: 63 - RNA, 21 nt, Artificial Sequence
  miRNA Sequence
uaaagugcugacagugcagau

SEQ ID NO: 64 - RNA, 21 nt, Artificial Sequence
  miRNA Sequence
aucugcacugucagcacuuua

SEQ ID NO: 65 - RNA, 23 nt, Artificial Sequence
  miRNA Sequence
agcagcauuguacagggcuauca

SEQ ID NO: 66 - RNA, 23 nt, Artificial Sequence
  miRNA Sequence
ugauagcccuguacaaugcugcu

SEQ ID NO: 67 - RNA, 22 nt, Artificial Sequence
  miRNA Sequence
caaauucguaucuaggggaaua

SEQ ID NO: 68 - RNA, 22 nt, Artificial Sequence
  miRNA Sequence
uauuccccuagauacgaauuug

SEQ ID NO: 69 - RNA, 23 nt, Artificial Sequence
  miRNA Sequence
uacccuguagauccgaauuugug

SEQ ID NO: 70 - RNA, 23 nt, Artificial Sequence
  miRNA Sequence
cacaaauucggaucuacagggua

SEQ ID NO: 71 - RNA, 22 nt, Artificial Sequence
  miRNA Sequence
acagauucgauucuaggggaau

SEQ ID NO: 72 - RNA, 22 nt, Artificial Sequence
  miRNA Sequence
auuccccuagaaucgaaucugu

SEQ ID NO: 73 - RNA, 23 nt, Artificial Sequence
  miRNA Sequence
uacccuguagaaccgaauuugug

SEQ ID NO: 74 - RNA, 23 nt, Artificial Sequence
  miRNA Sequence
cacaaauucgguucuacagggua

SEQ ID NO: 75 - RNA, 21 nt, Artificial Sequence
  miRNA Sequence
uugcucacuguucuucccuag

SEQ ID NO: 76 - RNA, 21 nt, Artificial Sequence
  miRNA Sequence
cuagggaagaacagugagcaa

SEQ ID NO: 77 - RNA, 21 nt, Artificial Sequence
  miRNA Sequence
aagcauucuuucauugguugg

SEQ ID NO: 78 - RNA, 21 nt, Artificial Sequence
  miRNA Sequence
ccaaccaaugaaagaaugcuu

SEQ ID NO: 79 - RNA, 22 nt, Artificial Sequence
  miRNA Sequence
uuuccggcucgcgugggugugu

SEQ ID NO: 80 - RNA, 22 nt, Artificial Sequence
  miRNA Sequence
acacacccacgcgagccggaaa

SEQ ID NO: 81 - RNA, 21 nt, Artificial Sequence
  miRNA Sequence
ccgucgccgccacccgagccg

SEQ ID NO: 82 - RNA, 21 nt, Artificial Sequence
  miRNA Sequence
cggcucggguggcggcgacgg

SEQ ID NO: 83 - RNA, 23 nt, Artificial Sequence
  miRNA Sequence
gagggucuugggagggaugugac

SEQ ID NO: 84 - RNA, 23 nt, Artificial Sequence
  miRNA Sequence
gucacaucccucccaagacccuc

SEQ ID NO: 85 - RNA, 27 nt, Artificial Sequence
  miRNA Sequence
cacuguaggugauggugagagugggca

SEQ ID NO: 86 - RNA, 27 nt, Artificial Sequence
  miRNA Sequence
ugcccacucucaccaucaccuacagug

SEQ ID NO: 87 - RNA, 23 nt, Artificial Sequence
  miRNA Sequence
ccugcagcgacuugauggcuucc

SEQ ID NO: 88 - RNA, 23 nt, Artificial Sequence
  miRNA Sequence
ggaagccaucaagucgcugcagg

SEQ ID NO: 89 - RNA, 22 nt, Artificial Sequence
  miRNA Sequence
auauacagggggagacucuuau

SEQ ID NO: 90 - RNA, 22 nt, Artificial Sequence
  miRNA Sequence
auaagagucucccccuguauau

SEQ ID NO: 91 - RNA, 22 nt, Artificial Sequence
  miRNA Sequence
auauacagggggagacucucau

SEQ ID NO: 92 - RNA, 22 nt, Artificial Sequence
  miRNA Sequence
augagagucucccccuguauau

SEQ ID NO: 93 - RNA, 21 nt, Artificial Sequence
  miRNA Sequence
agaggauacccuuuguauguu

SEQ ID NO: 94 - RNA, 21 nt, Artificial Sequence
  miRNA Sequence
aacauacaaaggguauccucu

SEQ ID NO: 95 - RNA, 23 nt, Artificial Sequence
  miRNA Sequence
gggaugguagaccggugacgugc

SEQ ID NO: 96 - RNA, 23 nt, Artificial Sequence
  miRNA Sequence
gcacgucaccggucuaccauccc

SEQ ID NO: 97 - RNA, 21 nt, Artificial Sequence
  miRNA Sequence
uaggacacauggucuacuucu

SEQ ID NO: 98 - RNA, 21 nt, Artificial Sequence
  miRNA Sequence
agaaguagaccauguguccua

SEQ ID NO: 99 - RNA, 22 nt, Artificial Sequence
  miRNA Sequence
cuccugagccauucugagccuc

SEQ ID NO: 100 - RNA, 22 nt, Artificial Sequence
  miRNA Sequence
gaggcucagaauggcucaggag

SEQ ID NO: 101 - RNA, 21 nt, Artificial Sequence
  miRNA Sequence
gugccagcugcagugggggag

SEQ ID NO: 102 - RNA, 21 nt, Artificial Sequence
  miRNA Sequence
cucccccacugcagcuggcac

SEQ ID NO: 103 - RNA, 21 nt, Artificial Sequence
  miRNA Sequence
cccggagccaggaugcagcuc

SEQ ID NO: 104 - RNA, 21 nt, Artificial Sequence
  miRNA Sequence
gagcugcauccuggcuccggg

SEQ ID NO: 105 - RNA, 21 nt, Artificial Sequence
  miRNA Sequence
ucguggccuggucuccauuau

SEQ ID NO: 106 - RNA, 21 nt, Artificial Sequence
  miRNA Sequence
auaauggagaccaggccacga

SEQ ID NO: 107 - RNA, 20 nt, Artificial Sequence
  miRNA Sequence
ucugcaggguuugcuuugag

SEQ ID NO: 108 - RNA, 20 nt, Artificial Sequence
  miRNA Sequence
cucaaagcaaacccugcaga

SEQ ID NO: 109 - RNA, 21 nt, Artificial Sequence
  miRNA Sequence
uguucauguagauguuuaagc

SEQ ID NO: 110 - RNA, 21 nt, Artificial Sequence
  miRNA Sequence
gcuuaaacaucuacaugaaca

SEQ ID NO: 111 - RNA, 18 nt, Artificial Sequence
  miRNA Sequence
ucagcuggcccucauuuc

SEQ ID NO: 112 - RNA, 18 nt, Artificial Sequence
  miRNA Sequence
gaaaugagggccagcuga

SEQ ID NO: 113 - RNA, 21 nt, Artificial Sequence
  miRNA Sequence
uggcagggaggcugggagggg

SEQ ID NO: 114 - RNA, 21 nt, Artificial Sequence
  miRNA Sequence
ccccucccagccucccugcca

SEQ ID NO: 115 - RNA, 20 nt, Artificial Sequence
  miRNA Sequence
ucacuguucagacaggcgga

SEQ ID NO: 116 - RNA, 20 nt, Artificial Sequence
  miRNA Sequence
uccgccugucugaacaguga

SEQ ID NO: 117 - RNA, 22 nt, Artificial Sequence
  miRNA Sequence
aacgccauuaucacacuaaaua

SEQ ID NO: 118 - RNA, 22 nt, Artificial Sequence
  miRNA Sequence
uauuuagugugauaauggcguu

SEQ ID NO: 119 - RNA, 22 nt, Artificial Sequence
  miRNA Sequence
uggagugugacaaugguguuug

SEQ ID NO: 120 - RNA, 22 nt, Artificial Sequence
  miRNA Sequence
caaacaccauugucacacucca

SEQ ID NO: 121 - RNA, 21 nt, Artificial Sequence
  miRNA Sequence
ccccaccuccucucuccucag

SEQ ID NO: 122 - RNA, 21 nt, Artificial Sequence
  miRNA Sequence
cugaggagagaggaggugggg

SEQ ID NO: 123 - RNA, 19 nt, Artificial Sequence
  miRNA Sequence
gugaggacucgggaggugg

SEQ ID NO: 124 - RNA, 19 nt, Artificial Sequence
  miRNA Sequence
ccaccucccgaguccucac

SEQ ID NO: 125 - RNA, 22 nt, Artificial Sequence
  miRNA Sequence
ugagccccugugccgcccccag

SEQ ID NO: 126 - RNA, 22 nt, Artificial Sequence
  miRNA Sequence
cugggggcggcacaggggcuca

SEQ ID NO: 127 - RNA, 22 nt, Artificial Sequence
  miRNA Sequence
guggguacggcccagugggggg

SEQ ID NO: 128 - RNA, 22 nt, Artificial Sequence
  miRNA Sequence
ccccccacugggccguacccac

SEQ ID NO: 129 - RNA, 22 nt, Artificial Sequence
  miRNA Sequence
ucaccagcccuguguucccuag

SEQ ID NO: 130 - RNA, 22 nt, Artificial Sequence
  miRNA Sequence
cuagggaacacagggcugguga

SEQ ID NO: 131 - RNA, 26 nt, Artificial Sequence
  miRNA Sequence
gugagggcaugcaggccuggaugggg

SEQ ID NO: 132 - RNA, 26 nt, Artificial Sequence
  miRNA Sequence
ccccauccaggccugcaugcccucac

SEQ ID NO: 133 - RNA, 20 nt, Artificial Sequence
  miRNA Sequence
cgugccacccuuuuccccag

SEQ ID NO: 134 - RNA, 20 nt, Artificial Sequence
  miRNA Sequence
cuggggaaaaggguggcacg

SEQ ID NO: 135 - RNA, 20 nt, Artificial Sequence
  miRNA Sequence
ucacaccugccucgcccccc

SEQ ID NO: 136 - RNA, 20 nt, Artificial Sequence
  miRNA Sequence
ggggggcgaggcagguguga

SEQ ID NO: 137 - RNA, 21 nt, Artificial Sequence
  miRNA Sequence
gugggcgggggcaggugugug

SEQ ID NO: 138 - RNA, 21 nt, Artificial Sequence
  miRNA Sequence
cacacaccugcccccgcccac

SEQ ID NO: 139 - RNA, 23 nt, Artificial Sequence
  miRNA Sequence
cucucaccacugcccucccacag

SEQ ID NO: 140 - RNA, 23 nt, Artificial Sequence
  miRNA Sequence
cugugggagggcaguggugagag

SEQ ID NO: 141 - RNA, 20 nt, Artificial Sequence
  miRNA Sequence
gugucugggcggacagcugc

SEQ ID NO: 142 - RNA, 20 nt, Artificial Sequence
  miRNA Sequence
gcagcuguccgcccagacac

SEQ ID NO: 143 - RNA, 20 nt, Artificial Sequence
  miRNA Sequence
ugagcccuguccucccgcag

SEQ ID NO: 144 - RNA, 20 nt, Artificial Sequence
  miRNA Sequence
cugcgggaggacagggcuca

SEQ ID NO: 145 - RNA, 22 nt, Artificial Sequence
  miRNA Sequence
ucggccugaccacccaccccac

SEQ ID NO: 146 - RNA, 22 nt, Artificial Sequence
  miRNA Sequence
gugggguggguggucaggccga

SEQ ID NO: 147 - RNA, 22 nt, Artificial Sequence
  miRNA Sequence
ccucuuccccuugucucuccag

SEQ ID NO: 148 - RNA, 22 nt, Artificial Sequence
  miRNA Sequence
cuggagagacaaggggaagagg

SEQ ID NO: 149 - RNA, 21 nt, Artificial Sequence
  miRNA Sequence
uccuucugcuccgucccccag

SEQ ID NO: 150 - RNA, 21 nt, Artificial Sequence
  miRNA Sequence
cugggggacggagcagaagga

SEQ ID NO: 151 - RNA, 20 nt, Artificial Sequence
  miRNA Sequence
cuuccucgucugucugcccc

SEQ ID NO: 152 - RNA, 20 nt, Artificial Sequence
  miRNA Sequence
ggggcagacagacgaggaag

SEQ ID NO: 153 - RNA, 20 nt, Artificial Sequence
  miRNA Sequence
uaaggcacgcggugaaugcc

SEQ ID NO: 154 - RNA, 20 nt, Artificial Sequence
  miRNA Sequence
ggcauucaccgcgugccuua

SEQ ID NO: 155 - RNA, 22 nt, Artificial Sequence
  miRNA Sequence
cguguucacagcggaccuugau

SEQ ID NO: 156 - RNA, 22 nt, Artificial Sequence
  miRNA Sequence
aucaagguccgcugugaacacg

SEQ ID NO: 157 - RNA, 22 nt, Artificial Sequence
  miRNA Sequence
aacuggaucaauuauaggagug

SEQ ID NO: 158 - RNA, 22 nt, Artificial Sequence
  miRNA Sequence
cacuccuauaauugauccaguu

SEQ ID NO: 159 - RNA, 26 nt, Artificial Sequence
  miRNA Sequence
aaguaguugguuuguaugagaugguu

SEQ ID NO: 160 - RNA, 26 nt, Artificial Sequence
  miRNA Sequence
aaccaucucauacaaaccaacuacuu

SEQ ID NO: 161 - RNA, 21 nt, Artificial Sequence
  miRNA Sequence
aagugaucuaaaggccuacau

SEQ ID NO: 162 - RNA, 21 nt, Artificial Sequence
  miRNA Sequence
auguaggccuuuagaucacuu

SEQ ID NO: 163 - RNA, 22 nt, Artificial Sequence
  miRNA Sequence
ucagaugaucuaaaggccuaua

SEQ ID NO: 164 - RNA, 22 nt, Artificial Sequence
  miRNA Sequence
uauaggccuuuagaucaucuga

SEQ ID NO: 165 - RNA, 21 nt, Artificial Sequence
  miRNA Sequence
uaggccuuuagaucacuuaaa

SEQ ID NO: 166 - RNA, 21 nt, Artificial Sequence
  miRNA Sequence
uuuaagugaucuaaaggccua

SEQ ID NO: 167 - RNA, 19 nt, Artificial Sequence
  miRNA Sequence
aauggauuuuuggagcagg

SEQ ID NO: 168 - RNA, 19 nt, Artificial Sequence
  miRNA Sequence
ccugcuccaaaaauccauu

SEQ ID NO: 169 - RNA, 24 nt, Artificial Sequence
  miRNA Sequence
ccccgggaacgucgagacuggagc

SEQ ID NO: 170 - RNA, 24 nt, Artificial Sequence
  miRNA Sequence
gcuccagucucgacguucccgggg

SEQ ID NO: 171 - RNA, 22 nt, Artificial Sequence
  miRNA Sequence
acccgucccguucguccccgga

SEQ ID NO: 172 - RNA, 22 nt, Artificial Sequence
  miRNA Sequence
uccggggacgaacgggacgggu

SEQ ID NO: 173 - RNA, 27 nt, Artificial Sequence
  miRNA Sequence
accuucuuguauaagcacugugcuaaa

SEQ ID NO: 174 - RNA, 27 nt, Artificial Sequence
  miRNA Sequence
uuuagcacagugcuuauacaagaaggu

SEQ ID NO: 175 - RNA, 22 nt, Artificial Sequence
  miRNA Sequence
acgcccuucccccccuucuuca

SEQ ID NO: 176 - RNA, 22 nt, Artificial Sequence
  miRNA Sequence
ugaagaagggggggaagggcgu

SEQ ID NO: 177 - RNA, 21 nt, Artificial Sequence
  miRNA Sequence
acggugcuggauguggccuuu

SEQ ID NO: 178 - RNA, 21 nt, Artificial Sequence
  miRNA Sequence
aaaggccacauccagcaccgu

SEQ ID NO: 179 - RNA, 21 nt, Artificial Sequence
  miRNA Sequence
acucuagcugccaaaggcgcu

SEQ ID NO: 180 - RNA, 21 nt, Artificial Sequence
  miRNA Sequence
agcgccuuuggcagcuagagu

SEQ ID NO: 181 - RNA, 22 nt, Artificial Sequence
  miRNA Sequence
agaaggaaauugaauucauuua

SEQ ID NO: 182 - RNA, 22 nt, Artificial Sequence
  miRNA Sequence
uaaaugaauucaauuuccuucu

SEQ ID NO: 183 - RNA, 21 nt, Artificial Sequence
  miRNA Sequence
agagaagaagaucagccugca

SEQ ID NO: 184 - RNA, 21 nt, Artificial Sequence
  miRNA Sequence
ugcaggcugaucuucuucucu

SEQ ID NO: 185 - RNA, 24 nt, Artificial Sequence
  miRNA Sequence
agccuggaagcuggagccugcagu

SEQ ID NO: 186 - RNA, 24 nt, Artificial Sequence
  miRNA Sequence
acugcaggcuccagcuuccaggcu

SEQ ID NO: 187 - RNA, 23 nt, Artificial Sequence
  miRNA Sequence
aggaugagcaaagaaaguagauu

SEQ ID NO: 188 - RNA, 23 nt, Artificial Sequence
  miRNA Sequence
aaucuacuuucuuugcucauccu

SEQ ID NO: 189 - RNA, 22 nt, Artificial Sequence
  miRNA Sequence
aaccacuuucuuugcucaucca

SEQ ID NO: 190 - RNA, 22 nt, Artificial Sequence
  miRNA Sequence
uggaugagcaaagaaagugguu

SEQ ID NO: 191 - RNA, 22 nt, Artificial Sequence
  miRNA Sequence
cggaugagcaaagaaagugguu

SEQ ID NO: 192 - RNA, 22 nt, Artificial Sequence
  miRNA Sequence
aaccacuuucuuugcucauccg

SEQ ID NO: 193 - RNA, 22 nt, Artificial Sequence
  miRNA Sequence
aggcauugacuucucacuagcu

SEQ ID NO: 194 - RNA, 22 nt, Artificial Sequence
  miRNA Sequence
agcuagugagaagucaaugccu

SEQ ID NO: 195 - RNA, 21 nt, Artificial Sequence
  miRNA Sequence
agugaaugauggguucugacc

SEQ ID NO: 196 - RNA, 21 nt, Artificial Sequence
  miRNA Sequence
ggucagaacccaucauucacu

SEQ ID NO: 197 - RNA, 21 nt, Artificial Sequence
  miRNA Sequence
aguuaggauuaggucguggaa

SEQ ID NO: 198 - RNA, 21 nt, Artificial Sequence
  miRNA Sequence
uuccacgaccuaauccuaacu

SEQ ID NO: 199 - RNA, 22 nt, Artificial Sequence
  miRNA Sequence
acaggugagguucuugggagcc

SEQ ID NO: 200 - RNA, 22 nt, Artificial Sequence
  miRNA Sequence
ggcucccaagaaccucaccugu

SEQ ID NO: 201 - RNA, 24 nt, Artificial Sequence
  miRNA Sequence
ucccugagacccuuuaaccuguga

SEQ ID NO: 202 - RNA, 24 nt, Artificial Sequence
  miRNA Sequence
ucacagguuaaagggucucaggga

SEQ ID NO: 203 - RNA, 22 nt, Artificial Sequence
  miRNA Sequence
acggguuaggcucuugggagcu

SEQ ID NO: 204 - RNA, 22 nt, Artificial Sequence
  miRNA Sequence
agcucccaagagccuaacccgu

SEQ ID NO: 205 - RNA, 22 nt, Artificial Sequence
  miRNA Sequence
ucacaagucaggcucuugggac

SEQ ID NO: 206 - RNA, 22 nt, Artificial Sequence
  miRNA Sequence
gucccaagagccugacuuguga

SEQ ID NO: 207 - RNA, 22 nt, Artificial Sequence
  miRNA Sequence
ucccugagacccuaacuuguga

SEQ ID NO: 208 - RNA, 22 nt, Artificial Sequence
  miRNA Sequence
ucacaaguuagggucucaggga

SEQ ID NO: 209 - RNA, 22 nt, Artificial Sequence
  miRNA Sequence
ucguaccgugaguaauaaugcg

SEQ ID NO: 210 - RNA, 22 nt, Artificial Sequence
  miRNA Sequence
cgcauuauuacucacgguacga

SEQ ID NO: 211 - RNA, 21 nt, Artificial Sequence
  miRNA Sequence
cauuauuacuuuugguacgcg

SEQ ID NO: 212 - RNA, 21 nt, Artificial Sequence
  miRNA Sequence
cgcguaccaaaaguaauaaug

SEQ ID NO: 213 - RNA, 18 nt, Artificial Sequence
  miRNA Sequence
aucccaccucugccacca

SEQ ID NO: 214 - RNA, 18 nt, Artificial Sequence
  miRNA Sequence
ugguggcagaggugggau

SEQ ID NO: 215 - RNA, 19 nt, Artificial Sequence
  miRNA Sequence
aucccaccacugccaccau

SEQ ID NO: 216 - RNA, 19 nt, Artificial Sequence
  miRNA Sequence
augguggcaguggugggau

SEQ ID NO: 217 - RNA, 19 nt, Artificial Sequence
  miRNA Sequence
auggauaaggcuuuggcuu

SEQ ID NO: 218 - RNA, 19 nt, Artificial Sequence
  miRNA Sequence
aagccaaagccuuauccau

SEQ ID NO: 219 - RNA, 22 nt, Artificial Sequence
  miRNA Sequence
augggugaauuuguagaaggau

SEQ ID NO: 220 - RNA, 22 nt, Artificial Sequence
  miRNA Sequence
auccuucuacaaauucacccau

SEQ ID NO: 221 - RNA, 22 nt, Artificial Sequence
  miRNA Sequence
augguacccuggcauacugagu

SEQ ID NO: 222 - RNA, 22 nt, Artificial Sequence
  miRNA Sequence
acucaguaugccaggguaccau

SEQ ID NO: 223 - RNA, 23 nt, Artificial Sequence
  miRNA Sequence
caagucuuauuugagcaccuguu

SEQ ID NO: 224 - RNA, 23 nt, Artificial Sequence
  miRNA Sequence
aacaggugcucaaauaagacuug

SEQ ID NO: 225 - RNA, 22 nt, Artificial Sequence
  miRNA Sequence
caggauguggucaaguguuguu

SEQ ID NO: 226 - RNA, 22 nt, Artificial Sequence
  miRNA Sequence
aacaacacuugaccacauccug

SEQ ID NO: 227 - RNA, 23 nt, Artificial Sequence
  miRNA Sequence
ccucagggcuguagaacagggcu

SEQ ID NO: 228 - RNA, 23 nt, Artificial Sequence
  miRNA Sequence
agcccuguucuacagcccugagg

SEQ ID NO: 229 - RNA, 21 nt, Artificial Sequence
  miRNA Sequence
ccuguugaaguguaaucccca

SEQ ID NO: 230 - RNA, 21 nt, Artificial Sequence
  miRNA Sequence
uggggauuacacuucaacagg

SEQ ID NO: 231 - RNA, 18 nt, Artificial Sequence
  miRNA Sequence
cgggcguggugguggggg

SEQ ID NO: 232 - RNA, 18 nt, Artificial Sequence
  miRNA Sequence
cccccaccaccacgcccg

SEQ ID NO: 233 - RNA, 20 nt, Artificial Sequence
  miRNA Sequence
cgggcgugguggugggggug

SEQ ID NO: 234 - RNA, 20 nt, Artificial Sequence
  miRNA Sequence
cacccccaccaccacgcccg

SEQ ID NO: 235 - RNA, 22 nt, Artificial Sequence
  miRNA Sequence
cuggacugagccgugcuacugg

SEQ ID NO: 236 - RNA, 22 nt, Artificial Sequence
  miRNA Sequence
ccaguagcacggcucaguccag

SEQ ID NO: 237 - RNA, 22 nt, Artificial Sequence
  miRNA Sequence
cuggacugagccaugcuacugg

SEQ ID NO: 238 - RNA, 22 nt, Artificial Sequence
  miRNA Sequence
ccaguagcauggcucaguccag

SEQ ID NO: 239 - RNA, 22 nt, Artificial Sequence
  miRNA Sequence
ucggauccgucugagcuuggcu

SEQ ID NO: 240 - RNA, 22 nt, Artificial Sequence
  miRNA Sequence
agccaagcucagacggauccga

SEQ ID NO: 241 - RNA, 22 nt, Artificial Sequence
  miRNA Sequence
cugaagcucagagggcucugau

SEQ ID NO: 242 - RNA, 22 nt, Artificial Sequence
  miRNA Sequence
aucagagcccucugagcuucag

SEQ ID NO: 243 - RNA, 23 nt, Artificial Sequence
  miRNA Sequence
cuggagauauggaagagcugugu

SEQ ID NO: 244 - RNA, 23 nt, Artificial Sequence
  miRNA Sequence
acacagcucuuccauaucuccag

SEQ ID NO: 245 - RNA, 22 nt, Artificial Sequence
  miRNA Sequence
agugccugcuaugugccaggca

SEQ ID NO: 246 - RNA, 22 nt, Artificial Sequence
  miRNA Sequence
ugccuggcacauagcaggcacu

SEQ ID NO: 247 - RNA, 22 nt, Artificial Sequence
  miRNA Sequence
cuuggcaccuagcaagcacuca

SEQ ID NO: 248 - RNA, 22 nt, Artificial Sequence
  miRNA Sequence
ugagugcuugcuaggugccaag

SEQ ID NO: 249 - RNA, 26 nt, Artificial Sequence
  miRNA Sequence
gaugaugauggcagcaaauucugaaa

SEQ ID NO: 250 - RNA, 26 nt, Artificial Sequence
  miRNA Sequence
uuucagaauuugcugccaucaucauc

SEQ ID NO: 251 - RNA, 25 nt, Artificial Sequence
  miRNA Sequence
gggcgacaaagcaagacucuuucuu

SEQ ID NO: 252 - RNA, 25 nt, Artificial Sequence
  miRNA Sequence
aagaaagagucuugcuuugucgccc

SEQ ID NO: 253 - RNA, 22 nt, Artificial Sequence
  miRNA Sequence
ggcgacaaaacgagacccuguc

SEQ ID NO: 254 - RNA, 22 nt, Artificial Sequence
  miRNA Sequence
gacagggucucguuuugucgcc

SEQ ID NO: 255 - RNA, 25 nt, Artificial Sequence
  miRNA Sequence
gaacccaugagguugaggcugcagu

SEQ ID NO: 256 - RNA, 25 nt, Artificial Sequence
  miRNA Sequence
acugcagccucaaccucauggguuc

SEQ ID NO: 257 - RNA, 22 nt, Artificial Sequence
  miRNA Sequence
uugcuugaacccaggaagugga

SEQ ID NO: 258 - RNA, 22 nt, Artificial Sequence
  miRNA Sequence
uccacuuccuggguucaagcaa

SEQ ID NO: 259 - RNA, 19 nt, Artificial Sequence
  miRNA Sequence
ggagauggagguugcagug

SEQ ID NO: 260 - RNA, 19 nt, Artificial Sequence
  miRNA Sequence
cacugcaaccuccaucucc

SEQ ID NO: 261 - RNA, 21 nt, Artificial Sequence
  miRNA Sequence
accacugcacuccagccugag

SEQ ID NO: 262 - RNA, 21 nt, Artificial Sequence
  miRNA Sequence
cucaggcuggagugcaguggu

SEQ ID NO: 263 - RNA, 22 nt, Artificial Sequence
  miRNA Sequence
ggugguugaggcugcaguaagu

SEQ ID NO: 264 - RNA, 22 nt, Artificial Sequence
  miRNA Sequence
acuuacugcagccucaaccacc

SEQ ID NO: 265 - RNA, 17 nt, Artificial Sequence
  miRNA Sequence
gugggggagaggcuguc

SEQ ID NO: 266 - RNA, 17 nt, Artificial Sequence
  miRNA Sequence
gacagccucucccccac

SEQ ID NO: 267 - RNA, 20 nt, Artificial Sequence
  miRNA Sequence
uaaagagcccuguggagaca

SEQ ID NO: 268 - RNA, 20 nt, Artificial Sequence
  miRNA Sequence
ugucuccacagggcucuuua

SEQ ID NO: 269 - RNA, 22 nt, Artificial Sequence
  miRNA Sequence
uacguagauauauauguauuuu

SEQ ID NO: 270 - RNA, 22 nt, Artificial Sequence
  miRNA Sequence
aaaauacauauauaucuacgua

SEQ ID NO: 271 - RNA, 24 nt, Artificial Sequence
  miRNA Sequence
aaauauauauauauauguacguau

SEQ ID NO: 272 - RNA, 24 nt, Artificial Sequence
  miRNA Sequence
auacguacauauauauauauauuu

SEQ ID NO: 273 - RNA, 22 nt, Artificial Sequence
  miRNA Sequence
uaguacugugcauaucaucuau

SEQ ID NO: 274 - RNA, 22 nt, Artificial Sequence
  miRNA Sequence
auagaugauaugcacaguacua

SEQ ID NO: 275 - RNA, 17 nt, Artificial Sequence
  miRNA Sequence
ucauauugcuucuuucu

SEQ ID NO: 276 - RNA, 17 nt, Artificial Sequence
  miRNA Sequence
agaaagaagcaauauga

SEQ ID NO: 277 - RNA, 21 nt, Artificial Sequence
  miRNA Sequence
ucacagugaaccggucucuuu

SEQ ID NO: 278 - RNA, 21 nt, Artificial Sequence
  miRNA Sequence
aaagagaccgguucacuguga

SEQ ID NO: 279 - RNA, 17 nt, Artificial Sequence
  miRNA Sequence
ucccaccgcugccaccc

SEQ ID NO: 280 - RNA, 17 nt, Artificial Sequence
  miRNA Sequence
ggguggcagcgguggga

SEQ ID NO: 281 - RNA, 17 nt, Artificial Sequence
  miRNA Sequence
ucgccuccuccucuccc

SEQ ID NO: 282 - RNA, 17 nt, Artificial Sequence
  miRNA Sequence
gggagaggaggaggcga

SEQ ID NO: 283 - RNA, 20 nt, Artificial Sequence
  miRNA Sequence
ucguuugccuuuuucugcuu

SEQ ID NO: 284 - RNA, 20 nt, Artificial Sequence
  miRNA Sequence
aagcagaaaaaggcaaacga

SEQ ID NO: 285 - RNA, 22 nt, Artificial Sequence
  miRNA Sequence
ucuacaaaggaaagcgcuuucu

SEQ ID NO: 286 - RNA, 22 nt, Artificial Sequence
  miRNA Sequence
agaaagcgcuuuccuuuguaga

SEQ ID NO: 287 - RNA, 22 nt, Artificial Sequence
  miRNA Sequence
ucuauacagacccuggcuuuuc

SEQ ID NO: 288 - RNA, 22 nt, Artificial Sequence
  miRNA Sequence
gaaaagccagggucuguauaga

SEQ ID NO: 289 - RNA, 22 nt, Artificial Sequence
  miRNA Sequence
ucugggcaacaaagugagaccu

SEQ ID NO: 290 - RNA, 22 nt, Artificial Sequence
  miRNA Sequence
aggucucacuuuguugcccaga

SEQ ID NO: 291 - RNA, 21 nt, Artificial Sequence
  miRNA Sequence
gaucucacuuuguugcccagg

SEQ ID NO: 292 - RNA, 21 nt, Artificial Sequence
  miRNA Sequence
ccugggcaacaaagugagauc

SEQ ID NO: 293 - RNA, 21 nt, Artificial Sequence
  miRNA Sequence
ugcaggaccaagaugagcccu

SEQ ID NO: 294 - RNA, 21 nt, Artificial Sequence
  miRNA Sequence
agggcucaucuugguccugca

SEQ ID NO: 295 - RNA, 22 nt, Artificial Sequence
  miRNA Sequence
ugcuggaucagugguucgaguc

SEQ ID NO: 296 - RNA, 22 nt, Artificial Sequence
  miRNA Sequence
gacucgaaccacugauccagca

SEQ ID NO: 297 - RNA, 21 nt, Artificial Sequence
  miRNA Sequence
uggacugcccugaucuggaga

SEQ ID NO: 298 - RNA, 21 nt, Artificial Sequence
  miRNA Sequence
ucuccagaucagggcagucca

SEQ ID NO: 299 - RNA, 23 nt, Artificial Sequence
  miRNA Sequence
uggaguccaggaaucugcauuuu

SEQ ID NO: 300 - RNA, 23 nt, Artificial Sequence
  miRNA Sequence
aaaaugcagauuccuggacucca

SEQ ID NO: 301 - RNA, 22 nt, Artificial Sequence
  miRNA Sequence
aagcccuuaccccaaaaaguau

SEQ ID NO: 302 - RNA, 22 nt, Artificial Sequence
  miRNA Sequence
auacuuuuugggguaagggcuu

SEQ ID NO: 303 - RNA, 22 nt, Artificial Sequence
  miRNA Sequence
aagcccuuaccccaaaaagcau

SEQ ID NO: 304 - RNA, 22 nt, Artificial Sequence
  miRNA Sequence
augcuuuuugggguaagggcuu

SEQ ID NO: 305 - RNA, 21 nt, Artificial Sequence
  miRNA Sequence
cuuuuugcggucugggcuugc

SEQ ID NO: 306 - RNA, 21 nt, Artificial Sequence
  miRNA Sequence
gcaagcccagaccgcaaaaag

SEQ ID NO: 307 - RNA, 19 nt, Artificial Sequence
  miRNA Sequence
uggauuuuuggaucaggga

SEQ ID NO: 308 - RNA, 19 nt, Artificial Sequence
  miRNA Sequence
ucccugauccaaaaaucca

SEQ ID NO: 309 - RNA, 24 nt, Artificial Sequence
  miRNA Sequence
uggcccugacugaagaccagcagu

SEQ ID NO: 310 - RNA, 24 nt, Artificial Sequence
  miRNA Sequence
acugcuggucuucagucagggcca

SEQ ID NO: 311 - RNA, 25 nt, Artificial Sequence
  miRNA Sequence
ugggaacggguuccggcagacgcug

SEQ ID NO: 312 - RNA, 25 nt, Artificial Sequence
  miRNA Sequence
cagcgucugccggaacccguuccca

SEQ ID NO: 313 - RNA, 22 nt, Artificial Sequence
  miRNA Sequence
uggguggucuggagauuugugc

SEQ ID NO: 314 - RNA, 22 nt, Artificial Sequence
  miRNA Sequence
gcacaaaucuccagaccaccca

SEQ ID NO: 315 - RNA, 22 nt, Artificial Sequence
  miRNA Sequence
ugugagguuggcauuguugucu

SEQ ID NO: 316 - RNA, 22 nt, Artificial Sequence
  miRNA Sequence
agacaacaaugccaaccucaca

SEQ ID NO: 317 - RNA, 21 nt, Artificial Sequence
  miRNA Sequence
uuaggccgcagaucuggguga

SEQ ID NO: 318 - RNA, 21 nt, Artificial Sequence
  miRNA Sequence
ucacccagaucugcggccuaa

SEQ ID NO: 319 - RNA, 22 nt, Artificial Sequence
  miRNA Sequence
aauaggccacggaucugggcaa

SEQ ID NO: 320 - RNA, 22 nt, Artificial Sequence
  miRNA Sequence
uugcccagauccguggccuauu

SEQ ID NO: 321 - RNA, 21 nt, Artificial Sequence
  miRNA Sequence
cacccagaucugcggccuaau

SEQ ID NO: 322 - RNA, 21 nt, Artificial Sequence
  miRNA Sequence
auuaggccgcagaucugggug

SEQ ID NO: 323 - RNA, 22 nt, Artificial Sequence
  miRNA Sequence
uuagggcccuggcuccaucucc

SEQ ID NO: 324 - RNA, 22 nt, Artificial Sequence
  miRNA Sequence
ggagauggagccagggcccuaa

SEQ ID NO: 325 - RNA, 17 nt, Artificial Sequence
  miRNA Sequence
uucaaguaauucaggug

SEQ ID NO: 326 - RNA, 17 nt, Artificial Sequence
  miRNA Sequence
caccugaauuacuugaa

SEQ ID NO: 327 - RNA, 22 nt, Artificial Sequence
  miRNA Sequence
uucauucggcuguccagaugua

SEQ ID NO: 328 - RNA, 22 nt, Artificial Sequence
  miRNA Sequence
uacaucuggacagccgaaugaa

SEQ ID NO: 329 - RNA, 22 nt, Artificial Sequence
  miRNA Sequence
uucuggaauucugugugaggga

SEQ ID NO: 330 - RNA, 22 nt, Artificial Sequence
  miRNA Sequence
ucccucacacagaauuccagaa

SEQ ID NO: 331 - RNA, 24 nt, Artificial Sequence
  miRNA Sequence
uugcagcugccugggagugacuuc

SEQ ID NO: 332 - RNA, 24 nt, Artificial Sequence
  miRNA Sequence
gaagucacucccaggcagcugcaa

SEQ ID NO: 333 - RNA, 21 nt, Artificial Sequence
  miRNA Sequence
uugggacauacuuaugcuaaa

SEQ ID NO: 334 - RNA, 21 nt, Artificial Sequence
  miRNA Sequence
uuuagcauaaguaugucccaa

SEQ ID NO: 335 - RNA, 22 nt, Artificial Sequence
  miRNA Sequence
uuuagagacggggucuugcucu

SEQ ID NO: 336 - RNA, 22 nt, Artificial Sequence
  miRNA Sequence
agagcaagaccccgucucuaaa

SEQ ID NO: 337 - RNA, 22 nt, Artificial Sequence
  miRNA Sequence
ucucacuguagccucgaacccc

SEQ ID NO: 338 - RNA, 22 nt, Artificial Sequence
  miRNA Sequence
gggguucgaggcuacagugaga

SEQ ID NO: 339 - RNA, 22 nt, Artificial Sequence
  miRNA Sequence
uuugaggcuacagugagaugug

SEQ ID NO: 340 - RNA, 22 nt, Artificial Sequence
  miRNA Sequence
cacaucucacuguagccucaaa

SEQ ID NO: 341 - RNA, 22 nt, Artificial Sequence
  miRNA Sequence
uuuucaacucuaaugggagaga

SEQ ID NO: 342 - RNA, 22 nt, Artificial Sequence
  miRNA Sequence
ucucucccauuagaguugaaaa

SEQ ID NO: 343 - RNA, 18 nt, Artificial Sequence
  miRNA Sequence
acguuggcucugguggug

SEQ ID NO: 344 - RNA, 18 nt, Artificial Sequence
  miRNA Sequence
caccaccagagccaacgu

SEQ ID NO: 345 - RNA, 22 nt, Artificial Sequence
  miRNA Sequence
ccaccuccccugcaaacgucca

SEQ ID NO: 346 - RNA, 22 nt, Artificial Sequence
  miRNA Sequence
uggacguuugcaggggaggugg

SEQ ID NO: 347 - RNA, 22 nt, Artificial Sequence
  miRNA Sequence
acucggcguggcgucggucgug

SEQ ID NO: 348 - RNA, 22 nt, Artificial Sequence
  miRNA Sequence
cacgaccgacgccacgccgagu

SEQ ID NO: 349 - RNA, 21 nt, Artificial Sequence
  miRNA Sequence
ucgaccggaccucgaccggcu

SEQ ID NO: 350 - RNA, 21 nt, Artificial Sequence
  miRNA Sequence
agccggucgagguccggucga

SEQ ID NO: 351 - RNA, 22 nt, Artificial Sequence
  miRNA Sequence
cagugcaauguuaaaagggcau

SEQ ID NO: 352 - RNA, 22 nt, Artificial Sequence
  miRNA Sequence
augcccuuuuaacauugcacug

SEQ ID NO: 353 - RNA, 22 nt, Artificial Sequence
  miRNA Sequence
uucacauugugcuacugucugc

SEQ ID NO: 354 - RNA, 22 nt, Artificial Sequence
  miRNA Sequence
gcagacaguagcacaaugugaa

SEQ ID NO: 355 - RNA, 22 nt, Artificial Sequence
  miRNA Sequence
cagugcaaugaugaaagggcau

SEQ ID NO: 356 - RNA, 22 nt, Artificial Sequence
  miRNA Sequence
augcccuuucaucauugcacug

SEQ ID NO: 357 - RNA, 21 nt, Artificial Sequence
  miRNA Sequence
acucuuucccuguugcacuac

SEQ ID NO: 358 - RNA, 21 nt, Artificial Sequence
  miRNA Sequence
guagugcaacagggaaagagu

SEQ ID NO: 359 - RNA, 22 nt, Artificial Sequence
  miRNA Sequence
uaacagucuacagccauggucg

SEQ ID NO: 360 - RNA, 22 nt, Artificial Sequence
  miRNA Sequence
cgaccauggcuguagacuguua

SEQ ID NO: 361 - RNA, 22 nt, Artificial Sequence
  miRNA Sequence
accguggcuuucgauuguuacu

SEQ ID NO: 362 - RNA, 22 nt, Artificial Sequence
  miRNA Sequence
aguaacaaucgaaagccacggu

SEQ ID NO: 363 - RNA, 18 nt, Artificial Sequence
  miRNA Sequence
cagggaggugaaugugau

SEQ ID NO: 364 - RNA, 18 nt, Artificial Sequence
  miRNA Sequence
aucacauucaccucccug

SEQ ID NO: 365 - RNA, 19 nt, Artificial Sequence
  miRNA Sequence
gaugaugcugcugaugcug

SEQ ID NO: 366 - RNA, 19 nt, Artificial Sequence
  miRNA Sequence
cagcaucagcagcaucauc

SEQ ID NO: 367 - RNA, 22 nt, Artificial Sequence
  miRNA Sequence
ucaaaacugaggggcauuuucu

SEQ ID NO: 368 - RNA, 22 nt, Artificial Sequence
  miRNA Sequence
agaaaaugccccucaguuuuga

SEQ ID NO: 369 - RNA, 24 nt, Artificial Sequence
  miRNA Sequence
ccagacagaauucuaugcacuuuc

SEQ ID NO: 370 - RNA, 24 nt, Artificial Sequence
  miRNA Sequence
gaaagugcauagaauucugucugg

SEQ ID NO: 371 - RNA, 22 nt, Artificial Sequence
  miRNA Sequence
uuugguccccuucaaccagcug

SEQ ID NO: 372 - RNA, 22 nt, Artificial Sequence
  miRNA Sequence
cagcugguugaaggggaccaaa

SEQ ID NO: 373 - RNA, 22 nt, Artificial Sequence
  miRNA Sequence
uuugguccccuucaaccagcua

SEQ ID NO: 374 - RNA, 22 nt, Artificial Sequence
  miRNA Sequence
uagcugguugaaggggaccaaa

SEQ ID NO: 375 - RNA, 22 nt, Artificial Sequence
  miRNA Sequence
ugugacugguugaccagagggg

SEQ ID NO: 376 - RNA, 22 nt, Artificial Sequence
  miRNA Sequence
ccccucuggucaaccagucaca

SEQ ID NO: 377 - RNA, 22 nt, Artificial Sequence
  miRNA Sequence
cuccuggggcccgcacucucgc

SEQ ID NO: 378 - RNA, 22 nt, Artificial Sequence
  miRNA Sequence
gcgagagugcgggccccaggag

SEQ ID NO: 379 - RNA, 22 nt, Artificial Sequence
  miRNA Sequence
uauagggauuggagccguggcg

SEQ ID NO: 380 - RNA, 22 nt, Artificial Sequence
  miRNA Sequence
cgccacggcuccaaucccuaua

SEQ ID NO: 381 - RNA, 23 nt, Artificial Sequence
  miRNA Sequence
uauggcuuuuuauuccuauguga

SEQ ID NO: 382 - RNA, 23 nt, Artificial Sequence
  miRNA Sequence
ucacauaggaauaaaaagccaua

SEQ ID NO: 383 - RNA, 22 nt, Artificial Sequence
  miRNA Sequence
auguagggcuaaaagccauggg

SEQ ID NO: 384 - RNA, 22 nt, Artificial Sequence
  miRNA Sequence
cccauggcuuuuagcccuacau

SEQ ID NO: 385 - RNA, 23 nt, Artificial Sequence
  miRNA Sequence
uauggcuuuucauuccuauguga

SEQ ID NO: 386 - RNA, 23 nt, Artificial Sequence
  miRNA Sequence
ucacauaggaaugaaaagccaua

SEQ ID NO: 387 - RNA, 22 nt, Artificial Sequence
  miRNA Sequence
caucaucgucucaaaugagucu

SEQ ID NO: 388 - RNA, 22 nt, Artificial Sequence
  miRNA Sequence
agacucauuugagacgaugaug

SEQ ID NO: 389 - RNA, 23 nt, Artificial Sequence
  miRNA Sequence
acuccauuuguuuugaugaugga

SEQ ID NO: 390 - RNA, 23 nt, Artificial Sequence
  miRNA Sequence
uccaucaucaaaacaaauggagu

SEQ ID NO: 391 - RNA, 23 nt, Artificial Sequence
  miRNA Sequence
uuauugcuuaagaauacgcguag

SEQ ID NO: 392 - RNA, 23 nt, Artificial Sequence
  miRNA Sequence
cuacgcguauucuuaagcaauaa

SEQ ID NO: 393 - RNA, 22 nt, Artificial Sequence
  miRNA Sequence
gcuacuucacaacaccagggcc

SEQ ID NO: 394 - RNA, 22 nt, Artificial Sequence
  miRNA Sequence
ggcccugguguugugaaguagc

SEQ ID NO: 395 - RNA, 22 nt, Artificial Sequence
  miRNA Sequence
gcuauuucacgacaccaggguu

SEQ ID NO: 396 - RNA, 22 nt, Artificial Sequence
  miRNA Sequence
aacccuggugucgugaaauagc

SEQ ID NO: 397 - RNA, 23 nt, Artificial Sequence
  miRNA Sequence
agcugguguugugaaucaggccg

SEQ ID NO: 398 - RNA, 23 nt, Artificial Sequence
  miRNA Sequence
cggccugauucacaacaccagcu

SEQ ID NO: 399 - RNA, 22 nt, Artificial Sequence
  miRNA Sequence
ggagacgcggcccuguuggagu

SEQ ID NO: 400 - RNA, 22 nt, Artificial Sequence
  miRNA Sequence
acuccaacagggccgcgucucc

SEQ ID NO: 401 - RNA, 22 nt, Artificial Sequence
  miRNA Sequence
ucuacagugcacgugucuccag

SEQ ID NO: 402 - RNA, 22 nt, Artificial Sequence
  miRNA Sequence
cuggagacacgugcacuguaga

SEQ ID NO: 403 - RNA, 21 nt, Artificial Sequence
  miRNA Sequence
uaccacaggguagaaccacgg

SEQ ID NO: 404 - RNA, 21 nt, Artificial Sequence
  miRNA Sequence
ccgugguucuacccuguggua

SEQ ID NO: 405 - RNA, 22 nt, Artificial Sequence
  miRNA Sequence
cagugguuuuacccuaugguag

SEQ ID NO: 406 - RNA, 22 nt, Artificial Sequence
  miRNA Sequence
cuaccauaggguaaaaccacug

SEQ ID NO: 407 - RNA, 22 nt, Artificial Sequence
  miRNA Sequence
uaacacugucugguaaagaugg

SEQ ID NO: 408 - RNA, 22 nt, Artificial Sequence
  miRNA Sequence
ccaucuuuaccagacaguguua

SEQ ID NO: 409 - RNA, 22 nt, Artificial Sequence
  miRNA Sequence
caucuuccaguacaguguugga

SEQ ID NO: 410 - RNA, 22 nt, Artificial Sequence
  miRNA Sequence
uccaacacuguacuggaagaug

SEQ ID NO: 411 - RNA, 23 nt, Artificial Sequence
  miRNA Sequence
uguaguguuuccuacuuuaugga

SEQ ID NO: 412 - RNA, 23 nt, Artificial Sequence
  miRNA Sequence
uccauaaaguaggaaacacuaca

SEQ ID NO: 413 - RNA, 21 nt, Artificial Sequence
  miRNA Sequence
cauaaaguagaaagcacuacu

SEQ ID NO: 414 - RNA, 21 nt, Artificial Sequence
  miRNA Sequence
aguagugcuuucuacuuuaug

SEQ ID NO: 415 - RNA, 21 nt, Artificial Sequence
  miRNA Sequence
ugagaugaagcacuguagcuc

SEQ ID NO: 416 - RNA, 21 nt, Artificial Sequence
  miRNA Sequence
gagcuacagugcuucaucuca

SEQ ID NO: 417 - RNA, 22 nt, Artificial Sequence
  miRNA Sequence
ggugcagugcugcaucucuggu

SEQ ID NO: 418 - RNA, 22 nt, Artificial Sequence
  miRNA Sequence
accagagaugcagcacugcacc

SEQ ID NO: 419 - RNA, 20 nt, Artificial Sequence
  miRNA Sequence
uacaguauagaugauguacu

SEQ ID NO: 420 - RNA, 20 nt, Artificial Sequence
  miRNA Sequence
aguacaucaucuauacugua

SEQ ID NO: 421 - RNA, 22 nt, Artificial Sequence
  miRNA Sequence
ggauaucaucauauacuguaag

SEQ ID NO: 422 - RNA, 22 nt, Artificial Sequence
  miRNA Sequence
cuuacaguauaugaugauaucc

SEQ ID NO: 423 - RNA, 22 nt, Artificial Sequence
  miRNA Sequence
ggauuccuggaaauacuguucu

SEQ ID NO: 424 - RNA, 22 nt, Artificial Sequence
  miRNA Sequence
agaacaguauuuccaggaaucc

SEQ ID NO: 425 - RNA, 23 nt, Artificial Sequence
  miRNA Sequence
guccaguuuucccaggaaucccu

SEQ ID NO: 426 - RNA, 23 nt, Artificial Sequence
  miRNA Sequence
agggauuccugggaaaacuggac

SEQ ID NO: 427 - RNA, 21 nt, Artificial Sequence
  miRNA Sequence
cuccguuugccuguuucgcug

SEQ ID NO: 428 - RNA, 21 nt, Artificial Sequence
  miRNA Sequence
cagcgaaacaggcaaacggag

SEQ ID NO: 429 - RNA, 22 nt, Artificial Sequence
  miRNA Sequence
cucggcgcggggcgcgggcucc

SEQ ID NO: 430 - RNA, 22 nt, Artificial Sequence
  miRNA Sequence
ggagcccgcgccccgcgccgag

SEQ ID NO: 431 - RNA, 22 nt, Artificial Sequence
  miRNA Sequence
ccucugaaauucaguucuucag

SEQ ID NO: 432 - RNA, 22 nt, Artificial Sequence
  miRNA Sequence
cugaagaacugaauuucagagg

SEQ ID NO: 433 - RNA, 22 nt, Artificial Sequence
  miRNA Sequence
ugagaacugaauuccauggguu

SEQ ID NO: 434 - RNA, 22 nt, Artificial Sequence
  miRNA Sequence
aacccauggaauucaguucuca

SEQ ID NO: 435 - RNA, 22 nt, Artificial Sequence
  miRNA Sequence
ugcccuguggacucaguucugg

SEQ ID NO: 436 - RNA, 22 nt, Artificial Sequence
  miRNA Sequence
ccagaacugaguccacagggca

SEQ ID NO: 437 - RNA, 22 nt, Artificial Sequence
  miRNA Sequence
ugagaacugaauuccauaggcu

SEQ ID NO: 438 - RNA, 22 nt, Artificial Sequence
  miRNA Sequence
agccuauggaauucaguucuca

SEQ ID NO: 439 - RNA, 21 nt, Artificial Sequence
  miRNA Sequence
gcccuccgcccgugcaccccg

SEQ ID NO: 440 - RNA, 21 nt, Artificial Sequence
  miRNA Sequence
cggggugcacgggcggagggc

SEQ ID NO: 441 - RNA, 22 nt, Artificial Sequence
  miRNA Sequence
gcccgcguguggagccaggugu

SEQ ID NO: 442 - RNA, 22 nt, Artificial Sequence
  miRNA Sequence
acaccuggcuccacacgcgggc

SEQ ID NO: 443 - RNA, 20 nt, Artificial Sequence
  miRNA Sequence
guguguggaaaugcuucugc

SEQ ID NO: 444 - RNA, 20 nt, Artificial Sequence
  miRNA Sequence
gcagaagcauuuccacacac

SEQ ID NO: 445 - RNA, 22 nt, Artificial Sequence
  miRNA Sequence
gugugcggaaaugcuucugcua

SEQ ID NO: 446 - RNA, 22 nt, Artificial Sequence
  miRNA Sequence
uagcagaagcauuuccgcacac

SEQ ID NO: 447 - RNA, 22 nt, Artificial Sequence
  miRNA Sequence
ucagugcacuacagaacuuugu

SEQ ID NO: 448 - RNA, 22 nt, Artificial Sequence
  miRNA Sequence
acaaaguucuguagugcacuga

SEQ ID NO: 449 - RNA, 22 nt, Artificial Sequence
  miRNA Sequence
aaaguucugagacacuccgacu

SEQ ID NO: 450 - RNA, 22 nt, Artificial Sequence
  miRNA Sequence
agucggagugucucagaacuuu

SEQ ID NO: 451 - RNA, 22 nt, Artificial Sequence
  miRNA Sequence
ucagugcaucacagaacuuugu

SEQ ID NO: 452 - RNA, 22 nt, Artificial Sequence
  miRNA Sequence
acaaaguucugugaugcacuga

SEQ ID NO: 453 - RNA, 22 nt, Artificial Sequence
  miRNA Sequence
aaguucuguuauacacucaggc

SEQ ID NO: 454 - RNA, 22 nt, Artificial Sequence
  miRNA Sequence
gccugaguguauaacagaacuu

SEQ ID NO: 455 - RNA, 21 nt, Artificial Sequence
  miRNA Sequence
agggagggacgggggcugugc

SEQ ID NO: 456 - RNA, 21 nt, Artificial Sequence
  miRNA Sequence
gcacagcccccgucccucccu

SEQ ID NO: 457 - RNA, 23 nt, Artificial Sequence
  miRNA Sequence
ucuggcuccgugucuucacuccc

SEQ ID NO: 458 - RNA, 23 nt, Artificial Sequence
  miRNA Sequence
gggagugaagacacggagccaga

SEQ ID NO: 459 - RNA, 22 nt, Artificial Sequence
  miRNA Sequence
cugguacaggccugggggacag

SEQ ID NO: 460 - RNA, 22 nt, Artificial Sequence
  miRNA Sequence
cugucccccaggccuguaccag

SEQ ID NO: 461 - RNA, 22 nt, Artificial Sequence
  miRNA Sequence
ucucccaacccuuguaccagug

SEQ ID NO: 462 - RNA, 22 nt, Artificial Sequence
  miRNA Sequence
cacugguacaaggguugggaga

SEQ ID NO: 463 - RNA, 21 nt, Artificial Sequence
  miRNA Sequence
cuagacugaagcuccuugagg

SEQ ID NO: 464 - RNA, 21 nt, Artificial Sequence
  miRNA Sequence
ccucaaggagcuucagucuag

SEQ ID NO: 465 - RNA, 21 nt, Artificial Sequence
  miRNA Sequence
ucgaggagcucacagucuagu

SEQ ID NO: 466 - RNA, 21 nt, Artificial Sequence
  miRNA Sequence
acuagacugugagcuccucga

SEQ ID NO: 467 - RNA, 18 nt, Artificial Sequence
  miRNA Sequence
ucgaggagcucacagucu

SEQ ID NO: 468 - RNA, 18 nt, Artificial Sequence
  miRNA Sequence
agacugugagcuccucga

SEQ ID NO: 469 - RNA, 21 nt, Artificial Sequence
  miRNA Sequence
ucagugcaugacagaacuugg

SEQ ID NO: 470 - RNA, 21 nt, Artificial Sequence
  miRNA Sequence
ccaaguucugucaugcacuga

SEQ ID NO: 471 - RNA, 22 nt, Artificial Sequence
  miRNA Sequence
uugcauagucacaaaagugauc

SEQ ID NO: 472 - RNA, 22 nt, Artificial Sequence
  miRNA Sequence
gaucacuuuugugacuaugcaa

SEQ ID NO: 473 - RNA, 22 nt, Artificial Sequence
  miRNA Sequence
aaaaccgucuaguuacaguugu

SEQ ID NO: 474 - RNA, 22 nt, Artificial Sequence
  miRNA Sequence
acaacuguaacuagacgguuuu

SEQ ID NO: 475 - RNA, 23 nt, Artificial Sequence
  miRNA Sequence
cggcccgggcugcugcuguuccu

SEQ ID NO: 476 - RNA, 23 nt, Artificial Sequence
  miRNA Sequence
aggaacagcagcagcccgggccg

SEQ ID NO: 477 - RNA, 21 nt, Artificial Sequence
  miRNA Sequence
uccugcgcgucccagaugccc

SEQ ID NO: 478 - RNA, 21 nt, Artificial Sequence
  miRNA Sequence
gggcaucugggacgcgcagga

SEQ ID NO: 479 - RNA, 22 nt, Artificial Sequence
  miRNA Sequence
aaucauacacgguugaccuauu

SEQ ID NO: 480 - RNA, 22 nt, Artificial Sequence
  miRNA Sequence
aauaggucaaccguguaugauu

SEQ ID NO: 481 - RNA, 22 nt, Artificial Sequence
  miRNA Sequence
uagguuauccguguugccuucg

SEQ ID NO: 482 - RNA, 22 nt, Artificial Sequence
  miRNA Sequence
cgaaggcaacacggauaaccua

SEQ ID NO: 483 - RNA, 22 nt, Artificial Sequence
  miRNA Sequence
cuccuacauauuagcauuaaca

SEQ ID NO: 484 - RNA, 22 nt, Artificial Sequence
  miRNA Sequence
uguuaaugcuaauauguaggag

SEQ ID NO: 485 - RNA, 23 nt, Artificial Sequence
  miRNA Sequence
uuaaugcuaaucgugauaggggu

SEQ ID NO: 486 - RNA, 23 nt, Artificial Sequence
  miRNA Sequence
accccuaucacgauuagcauuaa

SEQ ID NO: 487 - RNA, 20 nt, Artificial Sequence
  miRNA Sequence
uugggcugggcuggguuggg

SEQ ID NO: 488 - RNA, 20 nt, Artificial Sequence
  miRNA Sequence
cccaacccagcccagcccaa

SEQ ID NO: 489 - RNA, 22 nt, Artificial Sequence
  miRNA Sequence
caggccauauugugcugccuca

SEQ ID NO: 490 - RNA, 22 nt, Artificial Sequence
  miRNA Sequence
ugaggcagcacaauauggccug

SEQ ID NO: 491 - RNA, 22 nt, Artificial Sequence
  miRNA Sequence
uagcagcacauaaugguuugug

SEQ ID NO: 492 - RNA, 22 nt, Artificial Sequence
  miRNA Sequence
cacaaaccauuaugugcugcua

SEQ ID NO: 493 - RNA, 22 nt, Artificial Sequence
  miRNA Sequence
cgaaucauuauuugcugcucua

SEQ ID NO: 494 - RNA, 22 nt, Artificial Sequence
  miRNA Sequence
uagagcagcaaauaaugauucg

SEQ ID NO: 495 - RNA, 22 nt, Artificial Sequence
  miRNA Sequence
uagcagcacaucaugguuuaca

SEQ ID NO: 496 - RNA, 22 nt, Artificial Sequence
  miRNA Sequence
uguaaaccaugaugugcugcua

SEQ ID NO: 497 - RNA, 22 nt, Artificial Sequence
  miRNA Sequence
ccaguauuaacugugcugcuga

SEQ ID NO: 498 - RNA, 22 nt, Artificial Sequence
  miRNA Sequence
ucagcagcacaguuaauacugg

SEQ ID NO: 499 - RNA, 22 nt, Artificial Sequence
  miRNA Sequence
ccaauauuacugugcugcuuua

SEQ ID NO: 500 - RNA, 22 nt, Artificial Sequence
  miRNA Sequence
uaaagcagcacaguaauauugg

SEQ ID NO: 501 - RNA, 22 nt, Artificial Sequence
  miRNA Sequence
uagcagcacguaaauauuggcg

SEQ ID NO: 502 - RNA, 22 nt, Artificial Sequence
  miRNA Sequence
cgccaauauuuacgugcugcua

SEQ ID NO: 503 - RNA, 22 nt, Artificial Sequence
  miRNA Sequence
acugcagugaaggcacuuguag

SEQ ID NO: 504 - RNA, 22 nt, Artificial Sequence
  miRNA Sequence
cuacaagugccuucacugcagu

SEQ ID NO: 505 - RNA, 23 nt, Artificial Sequence
  miRNA Sequence
caaagugcuuacagugcagguag

SEQ ID NO: 506 - RNA, 23 nt, Artificial Sequence
  miRNA Sequence
cuaccugcacuguaagcacuuug

SEQ ID NO: 507 - RNA, 22 nt, Artificial Sequence
  miRNA Sequence
accacugaccguugacuguacc

SEQ ID NO: 508 - RNA, 22 nt, Artificial Sequence
  miRNA Sequence
gguacagucaacggucaguggu

SEQ ID NO: 509 - RNA, 22 nt, Artificial Sequence
  miRNA Sequence
accaucgaccguugauuguacc

SEQ ID NO: 510 - RNA, 22 nt, Artificial Sequence
  miRNA Sequence
gguacaaucaacggucgauggu

SEQ ID NO: 511 - RNA, 23 nt, Artificial Sequence
  miRNA Sequence
aacauucaacgcugucggugagu

SEQ ID NO: 512 - RNA, 23 nt, Artificial Sequence
  miRNA Sequence
acucaccgacagcguugaauguu

SEQ ID NO: 513 - RNA, 21 nt, Artificial Sequence
  miRNA Sequence
cucacugaacaaugaaugcaa

SEQ ID NO: 514 - RNA, 21 nt, Artificial Sequence
  miRNA Sequence
uugcauucauuguucagugag

SEQ ID NO: 515 - RNA, 23 nt, Artificial Sequence
  miRNA Sequence
aacauucauugcugucggugggu

SEQ ID NO: 516 - RNA, 23 nt, Artificial Sequence
  miRNA Sequence
acccaccgacagcaaugaauguu

SEQ ID NO: 517 - RNA, 22 nt, Artificial Sequence
  miRNA Sequence
aaccaucgaccguugaguggac

SEQ ID NO: 518 - RNA, 22 nt, Artificial Sequence
  miRNA Sequence
guccacucaacggucgaugguu

SEQ ID NO: 519 - RNA, 22 nt, Artificial Sequence
  miRNA Sequence
aacauucaaccugucggugagu

SEQ ID NO: 520 - RNA, 22 nt, Artificial Sequence
  miRNA Sequence
acucaccgacagguugaauguu

SEQ ID NO: 521 - RNA, 23 nt, Artificial Sequence
  miRNA Sequence
aacauucauuguugucggugggu

SEQ ID NO: 522 - RNA, 23 nt, Artificial Sequence
  miRNA Sequence
acccaccgacaacaaugaauguu

SEQ ID NO: 523 - RNA, 21 nt, Artificial Sequence
  miRNA Sequence
ugguucuagacuugccaacua

SEQ ID NO: 524 - RNA, 21 nt, Artificial Sequence
  miRNA Sequence
uaguuggcaagucuagaacca

SEQ ID NO: 525 - RNA, 24 nt, Artificial Sequence
  miRNA Sequence
uuuggcaaugguagaacucacacu

SEQ ID NO: 526 - RNA, 24 nt, Artificial Sequence
  miRNA Sequence
agugugaguucuaccauugccaaa

SEQ ID NO: 527 - RNA, 18 nt, Artificial Sequence
  miRNA Sequence
uccagugcccuccucucc

SEQ ID NO: 528 - RNA, 18 nt, Artificial Sequence
  miRNA Sequence
ggagaggagggcacugga

SEQ ID NO: 529 - RNA, 18 nt, Artificial Sequence
  miRNA Sequence
ugaggcaguagauugaau

SEQ ID NO: 530 - RNA, 18 nt, Artificial Sequence
  miRNA Sequence
auucaaucuacugccuca

SEQ ID NO: 531 - RNA, 22 nt, Artificial Sequence
  miRNA Sequence
gugaauuaccgaagggccauaa

SEQ ID NO: 532 - RNA, 22 nt, Artificial Sequence
  miRNA Sequence
uuauggcccuucgguaauucac

SEQ ID NO: 533 - RNA, 22 nt, Artificial Sequence
  miRNA Sequence
uauggcacugguagaauucacu

SEQ ID NO: 534 - RNA, 22 nt, Artificial Sequence
  miRNA Sequence
agugaauucuaccagugccaua

SEQ ID NO: 535 - RNA, 22 nt, Artificial Sequence
  miRNA Sequence
uggacggagaacugauaagggu

SEQ ID NO: 536 - RNA, 22 nt, Artificial Sequence
  miRNA Sequence
acccuuaucaguucuccgucca

SEQ ID NO: 537 - RNA, 22 nt, Artificial Sequence
  miRNA Sequence
aggggcuggcuuuccucugguc

SEQ ID NO: 538 - RNA, 22 nt, Artificial Sequence
  miRNA Sequence
gaccagaggaaagccagccccu

SEQ ID NO: 539 - RNA, 22 nt, Artificial Sequence
  miRNA Sequence
uggagagaaaggcaguuccuga

SEQ ID NO: 540 - RNA, 22 nt, Artificial Sequence
  miRNA Sequence
ucaggaacugccuuucucucca

SEQ ID NO: 541 - RNA, 22 nt, Artificial Sequence
  miRNA Sequence
gcccaaaggugaauuuuuuggg

SEQ ID NO: 542 - RNA, 22 nt, Artificial Sequence
  miRNA Sequence
cccaaaaaauucaccuuugggc

SEQ ID NO: 543 - RNA, 22 nt, Artificial Sequence
  miRNA Sequence
caaagaauucuccuuuugggcu

SEQ ID NO: 544 - RNA, 22 nt, Artificial Sequence
  miRNA Sequence
agcccaaaaggagaauucuuug

SEQ ID NO: 545 - RNA, 22 nt, Artificial Sequence
  miRNA Sequence
ucgugucuuguguugcagccgg

SEQ ID NO: 546 - RNA, 22 nt, Artificial Sequence
  miRNA Sequence
ccggcugcaacacaagacacga

SEQ ID NO: 547 - RNA, 22 nt, Artificial Sequence
  miRNA Sequence
ggcuacaacacaggacccgggc

SEQ ID NO: 548 - RNA, 22 nt, Artificial Sequence
  miRNA Sequence
gcccggguccuguguuguagcc

SEQ ID NO: 549 - RNA, 21 nt, Artificial Sequence
  miRNA Sequence
cucccacaugcaggguuugca

SEQ ID NO: 550 - RNA, 21 nt, Artificial Sequence
  miRNA Sequence
ugcaaacccugcaugugggag

SEQ ID NO: 551 - RNA, 21 nt, Artificial Sequence
  miRNA Sequence
caucccuugcaugguggaggg

SEQ ID NO: 552 - RNA, 21 nt, Artificial Sequence
  miRNA Sequence
cccuccaccaugcaagggaug

SEQ ID NO: 553 - RNA, 23 nt, Artificial Sequence
  miRNA Sequence
acugcccuaagugcuccuucugg

SEQ ID NO: 554 - RNA, 23 nt, Artificial Sequence
  miRNA Sequence
ccagaaggagcacuuagggcagu

SEQ ID NO: 555 - RNA, 23 nt, Artificial Sequence
  miRNA Sequence
uaaggugcaucuagugcagauag

SEQ ID NO: 556 - RNA, 23 nt, Artificial Sequence
  miRNA Sequence
cuaucugcacuagaugcaccuua

SEQ ID NO: 557 - RNA, 22 nt, Artificial Sequence
  miRNA Sequence
ugcccuaaaugccccuucuggc

SEQ ID NO: 558 - RNA, 22 nt, Artificial Sequence
  miRNA Sequence
gccagaaggggcauuuagggca

SEQ ID NO: 559 - RNA, 23 nt, Artificial Sequence
  miRNA Sequence
uaaggugcaucuagugcaguuag

SEQ ID NO: 560 - RNA, 23 nt, Artificial Sequence
  miRNA Sequence
cuaacugcacuagaugcaccuua

SEQ ID NO: 561 - RNA, 21 nt, Artificial Sequence
  miRNA Sequence
cggcggggacggcgauugguc

SEQ ID NO: 562 - RNA, 21 nt, Artificial Sequence
  miRNA Sequence
gaccaaucgccguccccgccg

SEQ ID NO: 563 - RNA, 22 nt, Artificial Sequence
  miRNA Sequence
cgcaggggccgggugcucaccg

SEQ ID NO: 564 - RNA, 22 nt, Artificial Sequence
  miRNA Sequence
cggugagcacccggccccugcg

SEQ ID NO: 565 - RNA, 21 nt, Artificial Sequence
  miRNA Sequence
ugagugccggugccugcccug

SEQ ID NO: 566 - RNA, 21 nt, Artificial Sequence
  miRNA Sequence
cagggcaggcaccggcacuca

SEQ ID NO: 567 - RNA, 22 nt, Artificial Sequence
  miRNA Sequence
ugauauguuugauauauuaggu

SEQ ID NO: 568 - RNA, 22 nt, Artificial Sequence
  miRNA Sequence
accuaauauaucaaacauauca

SEQ ID NO: 569 - RNA, 21 nt, Artificial Sequence
  miRNA Sequence
ugauauguuugauauuggguu

SEQ ID NO: 570 - RNA, 21 nt, Artificial Sequence
  miRNA Sequence
aacccaauaucaaacauauca

SEQ ID NO: 571 - RNA, 22 nt, Artificial Sequence
  miRNA Sequence
gcugcgcuuggauuucgucccc

SEQ ID NO: 572 - RNA, 22 nt, Artificial Sequence
  miRNA Sequence
ggggacgaaauccaagcgcagc

SEQ ID NO: 573 - RNA, 23 nt, Artificial Sequence
  miRNA Sequence
caacggaaucccaaaagcagcug

SEQ ID NO: 574 - RNA, 23 nt, Artificial Sequence
  miRNA Sequence
cagcugcuuuugggauuccguug

SEQ ID NO: 575 - RNA, 21 nt, Artificial Sequence
  miRNA Sequence
ccaguccugugccugccgccu

SEQ ID NO: 576 - RNA, 21 nt, Artificial Sequence
  miRNA Sequence
aggcggcaggcacaggacugg

SEQ ID NO: 577 - RNA, 20 nt, Artificial Sequence
  miRNA Sequence
caccaggcauuguggucucc

SEQ ID NO: 578 - RNA, 20 nt, Artificial Sequence
  miRNA Sequence
ggagaccacaaugccuggug

SEQ ID NO: 579 - RNA, 23 nt, Artificial Sequence
  miRNA Sequence
ugaguaccgccaugucuguuggg

SEQ ID NO: 580 - RNA, 23 nt, Artificial Sequence
  miRNA Sequence
cccaacagacauggcgguacuca

SEQ ID NO: 581 - RNA, 22 nt, Artificial Sequence
  miRNA Sequence
uacccagagcaugcagugugaa

SEQ ID NO: 582 - RNA, 22 nt, Artificial Sequence
  miRNA Sequence
uucacacugcaugcucugggua

SEQ ID NO: 583 - RNA, 22 nt, Artificial Sequence
  miRNA Sequence
ucugcccccuccgcugcugcca

SEQ ID NO: 584 - RNA, 22 nt, Artificial Sequence
  miRNA Sequence
uggcagcagcggagggggcaga

SEQ ID NO: 585 - RNA, 22 nt, Artificial Sequence
  miRNA Sequence
ggaggggucccgcacugggagg

SEQ ID NO: 586 - RNA, 22 nt, Artificial Sequence
  miRNA Sequence
ccucccagugcgggaccccucc

SEQ ID NO: 587 - RNA, 22 nt, Artificial Sequence
  miRNA Sequence
cccugugcccggcccacuucug

SEQ ID NO: 588 - RNA, 22 nt, Artificial Sequence
  miRNA Sequence
cagaagugggccgggcacaggg

SEQ ID NO: 589 - RNA, 20 nt, Artificial Sequence
  miRNA Sequence
ccccagggcgacgcggcggg

SEQ ID NO: 590 - DNA, 20 bp, Artificial Sequence
  miRNA Sequence
cccgccgcgtcgccctgggg

SEQ ID NO: 591 - RNA, 22 nt, Artificial Sequence
  miRNA Sequence
accuugccuugcugcccgggcc

SEQ ID NO: 592 - RNA, 22 nt, Artificial Sequence
  miRNA Sequence
ggcccgggcagcaaggcaaggu

SEQ ID NO: 593 - RNA, 22 nt, Artificial Sequence
  miRNA Sequence
cugccaauuccauaggucacag

SEQ ID NO: 594 - RNA, 22 nt, Artificial Sequence
  miRNA Sequence
cugugaccuauggaauuggcag

SEQ ID NO: 595 - RNA, 21 nt, Artificial Sequence
  miRNA Sequence
cugaccuaugaauugacagcc

SEQ ID NO: 596 - RNA, 21 nt, Artificial Sequence
  miRNA Sequence
ggcugucaauucauaggucag

SEQ ID NO: 597 - RNA, 22 nt, Artificial Sequence
  miRNA Sequence
aacuggccuacaaagucccagu

SEQ ID NO: 598 - RNA, 22 nt, Artificial Sequence
  miRNA Sequence
acugggacuuuguaggccaguu

SEQ ID NO: 599 - RNA, 22 nt, Artificial Sequence
  miRNA Sequence
ugggucuuugcgggcgagauga

SEQ ID NO: 600 - RNA, 22 nt, Artificial Sequence
  miRNA Sequence
ucaucucgcccgcaaagaccca

SEQ ID NO: 601 - RNA, 22 nt, Artificial Sequence
  miRNA Sequence
aacuggcccucaaagucccgcu

SEQ ID NO: 602 - RNA, 22 nt, Artificial Sequence
  miRNA Sequence
agcgggacuuugagggccaguu

SEQ ID NO: 603 - RNA, 22 nt, Artificial Sequence
  miRNA Sequence
cgggguuuugagggcgagauga

SEQ ID NO: 604 - RNA, 22 nt, Artificial Sequence
  miRNA Sequence
ucaucucgcccucaaaaccccg

SEQ ID NO: 605 - RNA, 22 nt, Artificial Sequence
  miRNA Sequence
ccaguggggcugcuguuaucug

SEQ ID NO: 606 - RNA, 22 nt, Artificial Sequence
  miRNA Sequence
cagauaacagcagccccacugg

SEQ ID NO: 607 - RNA, 22 nt, Artificial Sequence
  miRNA Sequence
uguaacagcaacuccaugugga

SEQ ID NO: 608 - RNA, 22 nt, Artificial Sequence
  miRNA Sequence
uccacauggaguugcuguuaca

SEQ ID NO: 609 - RNA, 22 nt, Artificial Sequence
  miRNA Sequence
ccaauauuggcugugcugcucc

SEQ ID NO: 610 - RNA, 22 nt, Artificial Sequence
  miRNA Sequence
ggagcagcacagccaauauugg

SEQ ID NO: 611 - RNA, 21 nt, Artificial Sequence
  miRNA Sequence
uagcagcacagaaauauuggc

SEQ ID NO: 612 - RNA, 21 nt, Artificial Sequence
  miRNA Sequence
gccaauauuucugugcugcua

SEQ ID NO: 613 - RNA, 22 nt, Artificial Sequence
  miRNA Sequence
cggcaacaagaaacugccugag

SEQ ID NO: 614 - RNA, 22 nt, Artificial Sequence
  miRNA Sequence
cucaggcaguuucuuguugccg

SEQ ID NO: 615 - RNA, 22 nt, Artificial Sequence
  miRNA Sequence
uagguaguuucauguuguuggg

SEQ ID NO: 616 - RNA, 22 nt, Artificial Sequence
  miRNA Sequence
cccaacaacaugaaacuaccua

SEQ ID NO: 617 - RNA, 22 nt, Artificial Sequence
  miRNA Sequence
ucgacagcacgacacugccuuc

SEQ ID NO: 618 - RNA, 22 nt, Artificial Sequence
  miRNA Sequence
gaaggcagugucgugcugucga

SEQ ID NO: 619 - RNA, 22 nt, Artificial Sequence
  miRNA Sequence
uagguaguuuccuguuguuggg

SEQ ID NO: 620 - RNA, 22 nt, Artificial Sequence
  miRNA Sequence
cccaacaacaggaaacuaccua

SEQ ID NO: 621 - RNA, 22 nt, Artificial Sequence
  miRNA Sequence
uucaccaccuucuccacccagc

SEQ ID NO: 622 - RNA, 22 nt, Artificial Sequence
  miRNA Sequence
gcuggguggagaagguggugaa

SEQ ID NO: 623 - RNA, 23 nt, Artificial Sequence
  miRNA Sequence
cggguagagagggcagugggagg

SEQ ID NO: 624 - RNA, 23 nt, Artificial Sequence
  miRNA Sequence
ccucccacugcccucucuacccg

SEQ ID NO: 625 - RNA, 22 nt, Artificial Sequence
  miRNA Sequence
ucaggccaggcacaguggcuca

SEQ ID NO: 626 - RNA, 22 nt, Artificial Sequence
  miRNA Sequence
ugagccacugugccuggccuga

SEQ ID NO: 627 - RNA, 19 nt, Artificial Sequence
  miRNA Sequence
accgugcaaagguagcaua

SEQ ID NO: 628 - RNA, 19 nt, Artificial Sequence
  miRNA Sequence
uaugcuaccuuugcacggu

SEQ ID NO: 629 - RNA, 20 nt, Artificial Sequence
  miRNA Sequence
ccuccugcccuccuugcugu

SEQ ID NO: 630 - RNA, 20 nt, Artificial Sequence
  miRNA Sequence
acagcaaggagggcaggagg

SEQ ID NO: 631 - RNA, 22 nt, Artificial Sequence
  miRNA Sequence
gguccagaggggagauagguuc

SEQ ID NO: 632 - RNA, 22 nt, Artificial Sequence
  miRNA Sequence
gaaccuaucuccccucuggacc

SEQ ID NO: 633 - RNA, 22 nt, Artificial Sequence
  miRNA Sequence
acaguagucugcacauugguua

SEQ ID NO: 634 - RNA, 22 nt, Artificial Sequence
  miRNA Sequence
uaaccaaugugcagacuacugu

SEQ ID NO: 635 - RNA, 23 nt, Artificial Sequence
  miRNA Sequence
cccaguguucagacuaccuguuc

SEQ ID NO: 636 - RNA, 23 nt, Artificial Sequence
  miRNA Sequence
gaacagguagucugaacacuggg

SEQ ID NO: 637 - RNA, 22 nt, Artificial Sequence
  miRNA Sequence
acaguagucugcacauugguua

SEQ ID NO: 638 - RNA, 22 nt, Artificial Sequence
  miRNA Sequence
uaaccaaugugcagacuacugu

SEQ ID NO: 639 - RNA, 23 nt, Artificial Sequence
  miRNA Sequence
cccaguguuuagacuaucuguuc

SEQ ID NO: 640 - RNA, 23 nt, Artificial Sequence
  miRNA Sequence
gaacagauagucuaaacacuggg

SEQ ID NO: 641 - RNA, 23 nt, Artificial Sequence
  miRNA Sequence
ugugcaaaucuaugcaaaacuga

SEQ ID NO: 642 - RNA, 23 nt, Artificial Sequence
  miRNA Sequence
ucaguuuugcauagauuugcaca

SEQ ID NO: 643 - RNA, 22 nt, Artificial Sequence
  miRNA Sequence
aguuuugcauaguugcacuaca

SEQ ID NO: 644 - RNA, 22 nt, Artificial Sequence
  miRNA Sequence
uguagugcaacuaugcaaaacu

SEQ ID NO: 645 - RNA, 23 nt, Artificial Sequence
  miRNA Sequence
aguuuugcagguuugcauccagc

SEQ ID NO: 646 - RNA, 23 nt, Artificial Sequence
  miRNA Sequence
gcuggaugcaaaccugcaaaacu

SEQ ID NO: 647 - RNA, 22 nt, Artificial Sequence
  miRNA Sequence
aguuuugcagguuugcauuuca

SEQ ID NO: 648 - RNA, 22 nt, Artificial Sequence
  miRNA Sequence
ugaaaugcaaaccugcaaaacu

SEQ ID NO: 649 - RNA, 23 nt, Artificial Sequence
  miRNA Sequence
ugugcaaauccaugcaaaacuga

SEQ ID NO: 650 - RNA, 23 nt, Artificial Sequence
  miRNA Sequence
ucaguuuugcauggauuugcaca

SEQ ID NO: 651 - RNA, 22 nt, Artificial Sequence
  miRNA Sequence
uaacacugucugguaacgaugu

SEQ ID NO: 652 - RNA, 22 nt, Artificial Sequence
  miRNA Sequence
acaucguuaccagacaguguua

SEQ ID NO: 653 - RNA, 22 nt, Artificial Sequence
  miRNA Sequence
caucuuaccggacagugcugga

SEQ ID NO: 654 - RNA, 22 nt, Artificial Sequence
  miRNA Sequence
uccagcacuguccgguaagaug

SEQ ID NO: 655 - RNA, 22 nt, Artificial Sequence
  miRNA Sequence
uaauacugccugguaaugauga

SEQ ID NO: 656 - RNA, 22 nt, Artificial Sequence
  miRNA Sequence
ucaucauuaccaggcaguauua

SEQ ID NO: 657 - RNA, 22 nt, Artificial Sequence
  miRNA Sequence
caucuuacugggcagcauugga

SEQ ID NO: 658 - RNA, 22 nt, Artificial Sequence
  miRNA Sequence
uccaaugcugcccaguaagaug

SEQ ID NO: 659 - RNA, 23 nt, Artificial Sequence
  miRNA Sequence
uaauacugccggguaaugaugga

SEQ ID NO: 660 - RNA, 23 nt, Artificial Sequence
  miRNA Sequence
uccaucauuacccggcaguauua

SEQ ID NO: 661 - RNA, 22 nt, Artificial Sequence
  miRNA Sequence
cgucuuacccagcaguguuugg

SEQ ID NO: 662 - RNA, 22 nt, Artificial Sequence
  miRNA Sequence
ccaaacacugcuggguaagacg

SEQ ID NO: 663 - RNA, 20 nt, Artificial Sequence
  miRNA Sequence
agagguauagggcaugggaa

SEQ ID NO: 664 - RNA, 20 nt, Artificial Sequence
  miRNA Sequence
uucccaugcccuauaccucu

SEQ ID NO: 665 - RNA, 22 nt, Artificial Sequence
  miRNA Sequence
uuccuaugcauauacuucuuug

SEQ ID NO: 666 - RNA, 22 nt, Artificial Sequence
  miRNA Sequence
caaagaaguauaugcauaggaa

SEQ ID NO: 667 - RNA, 22 nt, Artificial Sequence
  miRNA Sequence
gugaaauguuuaggaccacuag

SEQ ID NO: 668 - RNA, 22 nt, Artificial Sequence
  miRNA Sequence
cuagugguccuaaacauuucac

SEQ ID NO: 669 - RNA, 21 nt, Artificial Sequence
  miRNA Sequence
gcugggaaggcaaagggacgu

SEQ ID NO: 670 - RNA, 21 nt, Artificial Sequence
  miRNA Sequence
acgucccuuugccuucccagc

SEQ ID NO: 671 - RNA, 22 nt, Artificial Sequence
  miRNA Sequence
uucccuuugucauccuaugccu

SEQ ID NO: 672 - RNA, 22 nt, Artificial Sequence
  miRNA Sequence
aggcauaggaugacaaagggaa

SEQ ID NO: 673 - RNA, 21 nt, Artificial Sequence
  miRNA Sequence
gauuucaguggagugaaguuc

SEQ ID NO: 674 - RNA, 21 nt, Artificial Sequence
  miRNA Sequence
gaacuucacuccacugaaauc

SEQ ID NO: 675 - RNA, 22 nt, Artificial Sequence
  miRNA Sequence
uccuucauuccaccggagucug

SEQ ID NO: 676 - RNA, 22 nt, Artificial Sequence
  miRNA Sequence
cagacuccgguggaaugaagga

SEQ ID NO: 677 - RNA, 20 nt, Artificial Sequence
  miRNA Sequence
uguuuugauaacaguaaugu

SEQ ID NO: 678 - RNA, 20 nt, Artificial Sequence
  miRNA Sequence
acauuacuguuaucaaaaca

SEQ ID NO: 679 - RNA, 23 nt, Artificial Sequence
  miRNA Sequence
guguuaauuaaaccucuauuuac

SEQ ID NO: 680 - RNA, 23 nt, Artificial Sequence
  miRNA Sequence
guaaauagagguuuaauuaacac

SEQ ID NO: 681 - RNA, 23 nt, Artificial Sequence
  miRNA Sequence
cuguaauauaaauuuaauuuauu

SEQ ID NO: 682 - RNA, 23 nt, Artificial Sequence
  miRNA Sequence
aauaaauuaaauuuauauuacag

SEQ ID NO: 683 - RNA, 22 nt, Artificial Sequence
  miRNA Sequence
uggaauguaaggaagugugugg

SEQ ID NO: 684 - RNA, 22 nt, Artificial Sequence
  miRNA Sequence
ccacacacuuccuuacauucca

SEQ ID NO: 685 - RNA, 22 nt, Artificial Sequence
  miRNA Sequence
auaagacgagcaaaaagcuugu

SEQ ID NO: 686 - RNA, 22 nt, Artificial Sequence
  miRNA Sequence
acaagcuuuuugcucgucuuau

SEQ ID NO: 687 - RNA, 22 nt, Artificial Sequence
  miRNA Sequence
auaagacgaacaaaagguuugu

SEQ ID NO: 688 - RNA, 22 nt, Artificial Sequence
  miRNA Sequence
acaaaccuuuuguucgucuuau

SEQ ID NO: 689 - RNA, 22 nt, Artificial Sequence
  miRNA Sequence
acugcauuaugagcacuuaaag

SEQ ID NO: 690 - RNA, 22 nt, Artificial Sequence
  miRNA Sequence
cuuuaagugcucauaaugcagu

SEQ ID NO: 691 - RNA, 23 nt, Artificial Sequence
  miRNA Sequence
uaaagugcuuauagugcagguag

SEQ ID NO: 692 - RNA, 23 nt, Artificial Sequence
  miRNA Sequence
cuaccugcacuauaagcacuuua

SEQ ID NO: 693 - RNA, 22 nt, Artificial Sequence
  miRNA Sequence
acuguaguaugggcacuuccag

SEQ ID NO: 694 - RNA, 22 nt, Artificial Sequence
  miRNA Sequence
cuggaagugcccauacuacagu

SEQ ID NO: 695 - RNA, 23 nt, Artificial Sequence
  miRNA Sequence
caaagugcucauagugcagguag

SEQ ID NO: 696 - RNA, 23 nt, Artificial Sequence
  miRNA Sequence
cuaccugcacuaugagcacuuug

SEQ ID NO: 697 - RNA, 21 nt, Artificial Sequence
  miRNA Sequence
caacaccagucgaugggcugu

SEQ ID NO: 698 - RNA, 21 nt, Artificial Sequence
  miRNA Sequence
acagcccaucgacugguguug

SEQ ID NO: 699 - RNA, 22 nt, Artificial Sequence
  miRNA Sequence
uagcuuaucagacugauguuga

SEQ ID NO: 700 - RNA, 22 nt, Artificial Sequence
  miRNA Sequence
ucaacaucagucugauaagcua

SEQ ID NO: 701 - RNA, 22 nt, Artificial Sequence
  miRNA Sequence
cugugcgugugacagcggcuga

SEQ ID NO: 702 - RNA, 22 nt, Artificial Sequence
  miRNA Sequence
ucagccgcugucacacgcacag

SEQ ID NO: 703 - RNA, 21 nt, Artificial Sequence
  miRNA Sequence
gcagggacagcaaaggggugc

SEQ ID NO: 704 - RNA, 21 nt, Artificial Sequence
  miRNA Sequence
gcaccccuuugcugucccugc

SEQ ID NO: 705 - RNA, 22 nt, Artificial Sequence
  miRNA Sequence
uucccuuugucauccuucgccu

SEQ ID NO: 706 - RNA, 22 nt, Artificial Sequence
  miRNA Sequence
aggcgaaggaugacaaagggaa

SEQ ID NO: 707 - RNA, 22 nt, Artificial Sequence
  miRNA Sequence
uuggggaaacggccgcugagug

SEQ ID NO: 708 - RNA, 22 nt, Artificial Sequence
  miRNA Sequence
cacucagcggccguuuccccaa

SEQ ID NO: 709 - RNA, 21 nt, Artificial Sequence
  miRNA Sequence
auuugugcuuggcucugucac

SEQ ID NO: 710 - RNA, 21 nt, Artificial Sequence
  miRNA Sequence
gugacagagccaagcacaaau

SEQ ID NO: 711 - RNA, 21 nt, Artificial Sequence
  miRNA Sequence
cgagccucaagcaagggacuu

SEQ ID NO: 712 - RNA, 21 nt, Artificial Sequence
  miRNA Sequence
aagucccuugcuugaggcucg

SEQ ID NO: 713 - RNA, 22 nt, Artificial Sequence
  miRNA Sequence
uagucccuuccuugaagcgguc

SEQ ID NO: 714 - RNA, 22 nt, Artificial Sequence
  miRNA Sequence
gaccgcuucaaggaagggacua

SEQ ID NO: 715 - RNA, 22 nt, Artificial Sequence
  miRNA Sequence
caucagaauucauggaggcuag

SEQ ID NO: 716 - RNA, 22 nt, Artificial Sequence
  miRNA Sequence
cuagccuccaugaauucugaug

SEQ ID NO: 717 - RNA, 22 nt, Artificial Sequence
  miRNA Sequence
agcuuccaugacuccugaugga

SEQ ID NO: 718 - RNA, 22 nt, Artificial Sequence
  miRNA Sequence
uccaucaggagucauggaagcu

SEQ ID NO: 719 - RNA, 21 nt, Artificial Sequence
  miRNA Sequence
ccucccaugccaagaacuccc

SEQ ID NO: 720 - RNA, 21 nt, Artificial Sequence
  miRNA Sequence
gggaguucuuggcaugggagg

SEQ ID NO: 721 - RNA, 21 nt, Artificial Sequence
  miRNA Sequence
gguucuuagcauaggaggucu

SEQ ID NO: 722 - RNA, 21 nt, Artificial Sequence
  miRNA Sequence
agaccuccuaugcuaagaacc

SEQ ID NO: 723 - RNA, 21 nt, Artificial Sequence
  miRNA Sequence
uguucucuuugccaaggacag

SEQ ID NO: 724 - RNA, 21 nt, Artificial Sequence
  miRNA Sequence
cuguccuuggcaaagagaaca

SEQ ID NO: 725 - RNA, 21 nt, Artificial Sequence
  miRNA Sequence
uaacagucuccagucacggcc

SEQ ID NO: 726 - RNA, 21 nt, Artificial Sequence
  miRNA Sequence
ggccgugacuggagacuguua

SEQ ID NO: 727 - RNA, 23 nt, Artificial Sequence
  miRNA Sequence
accuuggcucuagacugcuuacu

SEQ ID NO: 728 - RNA, 23 nt, Artificial Sequence
  miRNA Sequence
aguaagcagucuagagccaaggu

SEQ ID NO: 729 - RNA, 22 nt, Artificial Sequence
  miRNA Sequence
acagcaggcacagacaggcagu

SEQ ID NO: 730 - RNA, 22 nt, Artificial Sequence
  miRNA Sequence
acugccugucugugccugcugu

SEQ ID NO: 731 - RNA, 22 nt, Artificial Sequence
  miRNA Sequence
ugccugucuacacuugcugugc

SEQ ID NO: 732 - RNA, 22 nt, Artificial Sequence
  miRNA Sequence
gcacagcaaguguagacaggca

SEQ ID NO: 733 - RNA, 21 nt, Artificial Sequence
  miRNA Sequence
augaccuaugaauugacagac

SEQ ID NO: 734 - RNA, 21 nt, Artificial Sequence
  miRNA Sequence
gucugucaauucauaggucau

SEQ ID NO: 735 - RNA, 22 nt, Artificial Sequence
  miRNA Sequence
uaaucucagcuggcaacuguga

SEQ ID NO: 736 - RNA, 22 nt, Artificial Sequence
  miRNA Sequence
ucacaguugccagcugagauua

SEQ ID NO: 737 - RNA, 22 nt, Artificial Sequence
  miRNA Sequence
aaaucucugcaggcaaauguga

SEQ ID NO: 738 - RNA, 22 nt, Artificial Sequence
  miRNA Sequence
ucacauuugccugcagagauuu

SEQ ID NO: 739 - RNA, 23 nt, Artificial Sequence
  miRNA Sequence
uacugcaucaggaacugauugga

SEQ ID NO: 740 - RNA, 23 nt, Artificial Sequence
  miRNA Sequence
uccaaucaguuccugaugcagua

SEQ ID NO: 741 - RNA, 22 nt, Artificial Sequence
  miRNA Sequence
augguuccgucaagcaccaugg

SEQ ID NO: 742 - RNA, 22 nt, Artificial Sequence
  miRNA Sequence
ccauggugcuugacggaaccau

SEQ ID NO: 743 - RNA, 22 nt, Artificial Sequence
  miRNA Sequence
caugguucugucaagcaccgcg

SEQ ID NO: 744 - RNA, 22 nt, Artificial Sequence
  miRNA Sequence
cgcggugcuugacagaaccaug

SEQ ID NO: 745 - RNA, 21 nt, Artificial Sequence
  miRNA Sequence
uugugcuugaucuaaccaugu

SEQ ID NO: 746 - RNA, 21 nt, Artificial Sequence
  miRNA Sequence
acaugguuagaucaagcacaa

SEQ ID NO: 747 - RNA, 22 nt, Artificial Sequence
  miRNA Sequence
agaguugagucuggacgucccg

SEQ ID NO: 748 - RNA, 22 nt, Artificial Sequence
  miRNA Sequence
cgggacguccagacucaacucu

SEQ ID NO: 749 - RNA, 22 nt, Artificial Sequence
  miRNA Sequence
agaauuguggcuggacaucugu

SEQ ID NO: 750 - RNA, 22 nt, Artificial Sequence
  miRNA Sequence
acagauguccagccacaauucu

SEQ ID NO: 751 - RNA, 21 nt, Artificial Sequence
  miRNA Sequence
ugauuguccaaacgcaauucu

SEQ ID NO: 752 - RNA, 21 nt, Artificial Sequence
  miRNA Sequence
agaauugcguuuggacaauca

SEQ ID NO: 753 - RNA, 22 nt, Artificial Sequence
  miRNA Sequence
aagcugccaguugaagaacugu

SEQ ID NO: 754 - RNA, 22 nt, Artificial Sequence
  miRNA Sequence
acaguucuucaacuggcagcuu

SEQ ID NO: 755 - RNA, 22 nt, Artificial Sequence
  miRNA Sequence
aguucuucaguggcaagcuuua

SEQ ID NO: 756 - RNA, 22 nt, Artificial Sequence
  miRNA Sequence
uaaagcuugccacugaagaacu

SEQ ID NO: 757 - RNA, 23 nt, Artificial Sequence
  miRNA Sequence
agcuacauugucugcuggguuuc

SEQ ID NO: 758 - RNA, 23 nt, Artificial Sequence
  miRNA Sequence
gaaacccagcagacaauguagcu

SEQ ID NO: 759 - RNA, 22 nt, Artificial Sequence
  miRNA Sequence
accuggcauacaauguagauuu

SEQ ID NO: 760 - RNA, 22 nt, Artificial Sequence
  miRNA Sequence
aaaucuacauuguaugccaggu

SEQ ID NO: 761 - RNA, 21 nt, Artificial Sequence
  miRNA Sequence
agcuacaucuggcuacugggu

SEQ ID NO: 762 - RNA, 21 nt, Artificial Sequence
  miRNA Sequence
acccaguagccagauguagcu

SEQ ID NO: 763 - RNA, 22 nt, Artificial Sequence
  miRNA Sequence
cucaguagccaguguagauccu

SEQ ID NO: 764 - RNA, 22 nt, Artificial Sequence
  miRNA Sequence
aggaucuacacuggcuacugag

SEQ ID NO: 765 - RNA, 22 nt, Artificial Sequence
  miRNA Sequence
ugucaguuugucaaauacccca

SEQ ID NO: 766 - RNA, 22 nt, Artificial Sequence
  miRNA Sequence
ugggguauuugacaaacugaca

SEQ ID NO: 767 - RNA, 22 nt, Artificial Sequence
  miRNA Sequence
cguguauuugacaagcugaguu

SEQ ID NO: 768 - RNA, 22 nt, Artificial Sequence
  miRNA Sequence
aacucagcuugucaaauacacg

SEQ ID NO: 769 - RNA, 23 nt, Artificial Sequence
  miRNA Sequence
aaaauggugcccuagugacuaca

SEQ ID NO: 770 - RNA, 23 nt, Artificial Sequence
  miRNA Sequence
uguagucacuagggcaccauuuu

SEQ ID NO: 771 - RNA, 21 nt, Artificial Sequence
  miRNA Sequence
caagucacuagugguuccguu

SEQ ID NO: 772 - RNA, 21 nt, Artificial Sequence
  miRNA Sequence
aacggaaccacuagugacuug

SEQ ID NO: 773 - RNA, 22 nt, Artificial Sequence
  miRNA Sequence
ucugcaagugucagaggcgagg

SEQ ID NO: 774 - RNA, 22 nt, Artificial Sequence
  miRNA Sequence
ccucgccucugacacuugcaga

SEQ ID NO: 775 - RNA, 21 nt, Artificial Sequence
  miRNA Sequence
ugacagcgcccugccuggcuc

SEQ ID NO: 776 - RNA, 21 nt, Artificial Sequence
  miRNA Sequence
gagccaggcagggcgcuguca

SEQ ID NO: 777 - RNA, 24 nt, Artificial Sequence
  miRNA Sequence
agcgcgggcugagcgcugccaguc

SEQ ID NO: 778 - RNA, 24 nt, Artificial Sequence
  miRNA Sequence
gacuggcagcgcucagcccgcgcu

SEQ ID NO: 779 - RNA, 22 nt, Artificial Sequence
  miRNA Sequence
gagagcaguguguguugccugg

SEQ ID NO: 780 - RNA, 22 nt, Artificial Sequence
  miRNA Sequence
ccaggcaacacacacugcucuc

SEQ ID NO: 781 - RNA, 22 nt, Artificial Sequence
  miRNA Sequence
auuguccuugcuguuuggagau

SEQ ID NO: 782 - RNA, 22 nt, Artificial Sequence
  miRNA Sequence
aucuccaaacagcaaggacaau

SEQ ID NO: 783 - RNA, 21 nt, Artificial Sequence
  miRNA Sequence
auccccagauacaauggacaa

SEQ ID NO: 784 - RNA, 21 nt, Artificial Sequence
  miRNA Sequence
uuguccauuguaucuggggau

SEQ ID NO: 785 - RNA, 20 nt, Artificial Sequence
  miRNA Sequence
uaggaugggggugagaggug

SEQ ID NO: 786 - RNA, 20 nt, Artificial Sequence
  miRNA Sequence
caccucucacccccauccua

SEQ ID NO: 787 - RNA, 21 nt, Artificial Sequence
  miRNA Sequence
aucacauugccagggauuucc

SEQ ID NO: 788 - RNA, 21 nt, Artificial Sequence
  miRNA Sequence
ggaaaucccuggcaaugugau

SEQ ID NO: 789 - RNA, 22 nt, Artificial Sequence
  miRNA Sequence
gggguuccuggggaugggauuu

SEQ ID NO: 790 - RNA, 22 nt, Artificial Sequence
  miRNA Sequence
aaaucccauccccaggaacccc

SEQ ID NO: 791 - RNA, 21 nt, Artificial Sequence
  miRNA Sequence
aucacauugccagggauuacc

SEQ ID NO: 792 - RNA, 21 nt, Artificial Sequence
  miRNA Sequence
gguaaucccuggcaaugugau

SEQ ID NO: 793 - RNA, 22 nt, Artificial Sequence
  miRNA Sequence
uggguuccuggcaugcugauuu

SEQ ID NO: 794 - RNA, 22 nt, Artificial Sequence
  miRNA Sequence
aaaucagcaugccaggaaccca

SEQ ID NO: 795 - RNA, 22 nt, Artificial Sequence
  miRNA Sequence
aucacauugccagugauuaccc

SEQ ID NO: 796 - RNA, 22 nt, Artificial Sequence
  miRNA Sequence
ggguaaucacuggcaaugugau

SEQ ID NO: 797 - RNA, 22 nt, Artificial Sequence
  miRNA Sequence
ugccuacugagcugauaucagu

SEQ ID NO: 798 - RNA, 22 nt, Artificial Sequence
  miRNA Sequence
acugauaucagcucaguaggca

SEQ ID NO: 799 - RNA, 22 nt, Artificial Sequence
  miRNA Sequence
ugccuacugagcugaaacacag

SEQ ID NO: 800 - RNA, 22 nt, Artificial Sequence
  miRNA Sequence
cuguguuucagcucaguaggca

SEQ ID NO: 801 - RNA, 22 nt, Artificial Sequence
  miRNA Sequence
uggcucaguucagcaggaacag

SEQ ID NO: 802 - RNA, 22 nt, Artificial Sequence
  miRNA Sequence
cuguuccugcugaacugagcca

SEQ ID NO: 803 - RNA, 22 nt, Artificial Sequence
  miRNA Sequence
agcagaggcagagaggcucagg

SEQ ID NO: 804 - RNA, 22 nt, Artificial Sequence
  miRNA Sequence
ccugagccucucugccucugcu

SEQ ID NO: 805 - RNA, 23 nt, Artificial Sequence
  miRNA Sequence
ugaggcucuguuagccuuggcuc

SEQ ID NO: 806 - RNA, 23 nt, Artificial Sequence
  miRNA Sequence
gagccaaggcuaacagagccuca

SEQ ID NO: 807 - RNA, 22 nt, Artificial Sequence
  miRNA Sequence
cauugcacuugucucggucuga

SEQ ID NO: 808 - RNA, 22 nt, Artificial Sequence
  miRNA Sequence
ucagaccgagacaagugcaaug

SEQ ID NO: 809 - RNA, 21 nt, Artificial Sequence
  miRNA Sequence
aggcggagacuugggcaauug

SEQ ID NO: 810 - RNA, 21 nt, Artificial Sequence
  miRNA Sequence
caauugcccaagucuccgccu

SEQ ID NO: 811 - RNA, 22 nt, Artificial Sequence
  miRNA Sequence
uaucauggaguugguaaagcac

SEQ ID NO: 812 - RNA, 22 nt, Artificial Sequence
  miRNA Sequence
gugcuuuaccaacuccaugaua

SEQ ID NO: 813 - RNA, 22 nt, Artificial Sequence
  miRNA Sequence
guuuuaccaccuccaggagacu

SEQ ID NO: 814 - RNA, 22 nt, Artificial Sequence
  miRNA Sequence
agucuccuggaggugguaaaac

SEQ ID NO: 815 - RNA, 22 nt, Artificial Sequence
  miRNA Sequence
cgccucuucagcgcugucuucc

SEQ ID NO: 816 - RNA, 22 nt, Artificial Sequence
  miRNA Sequence
ggaagacagcgcugaagaggcg

SEQ ID NO: 817 - RNA, 23 nt, Artificial Sequence
  miRNA Sequence
caggcagugacuguucagacguc

SEQ ID NO: 818 - RNA, 23 nt, Artificial Sequence
  miRNA Sequence
gacgucugaacagucacugccug

SEQ ID NO: 819 - RNA, 22 nt, Artificial Sequence
  miRNA Sequence
ccuauucuugguuacuugcacg

SEQ ID NO: 820 - RNA, 22 nt, Artificial Sequence
  miRNA Sequence
cgugcaaguaaccaagaauagg

SEQ ID NO: 821 - RNA, 22 nt, Artificial Sequence
  miRNA Sequence
ccuauucuugauuacuuguuuc

SEQ ID NO: 822 - RNA, 22 nt, Artificial Sequence
  miRNA Sequence
gaaacaaguaaucaagaauagg

SEQ ID NO: 823 - RNA, 22 nt, Artificial Sequence
  miRNA Sequence
uucaaguaauccaggauaggcu

SEQ ID NO: 824 - RNA, 22 nt, Artificial Sequence
  miRNA Sequence
agccuauccuggauuacuugaa

SEQ ID NO: 825 - RNA, 22 nt, Artificial Sequence
  miRNA Sequence
ccuguucuccauuacuuggcuc

SEQ ID NO: 826 - RNA, 22 nt, Artificial Sequence
  miRNA Sequence
gagccaaguaauggagaacagg

SEQ ID NO: 827 - RNA, 21 nt, Artificial Sequence
  miRNA Sequence
uucaaguaauucaggauaggu

SEQ ID NO: 828 - RNA, 21 nt, Artificial Sequence
  miRNA Sequence
accuauccugaauuacuugaa

SEQ ID NO: 829 - RNA, 21 nt, Artificial Sequence
  miRNA Sequence
uucacaguggcuaaguuccgc

SEQ ID NO: 830 - RNA, 21 nt, Artificial Sequence
  miRNA Sequence
gcggaacuuagccacugugaa

SEQ ID NO: 831 - RNA, 22 nt, Artificial Sequence
  miRNA Sequence
agggcuuagcugcuugugagca

SEQ ID NO: 832 - RNA, 22 nt, Artificial Sequence
  miRNA Sequence
ugcucacaagcagcuaagcccu

SEQ ID NO: 833 - RNA, 21 nt, Artificial Sequence
  miRNA Sequence
uucacaguggcuaaguucugc

SEQ ID NO: 834 - RNA, 21 nt, Artificial Sequence
  miRNA Sequence
gcagaacuuagccacugugaa

SEQ ID NO: 835 - RNA, 22 nt, Artificial Sequence
  miRNA Sequence
agagcuuagcugauuggugaac

SEQ ID NO: 836 - RNA, 22 nt, Artificial Sequence
  miRNA Sequence
guucaccaaucagcuaagcucu

SEQ ID NO: 837 - RNA, 22 nt, Artificial Sequence
  miRNA Sequence
cacuagauugugagcuccugga

SEQ ID NO: 838 - RNA, 22 nt, Artificial Sequence
  miRNA Sequence
uccaggagcucacaaucuagug

SEQ ID NO: 839 - RNA, 22 nt, Artificial Sequence
  miRNA Sequence
aaggagcucacagucuauugag

SEQ ID NO: 840 - RNA, 22 nt, Artificial Sequence
  miRNA Sequence
cucaauagacugugagcuccuu

SEQ ID NO: 841 - RNA, 19 nt, Artificial Sequence
  miRNA Sequence
ggggccuggcggugggcgg

SEQ ID NO: 842 - RNA, 19 nt, Artificial Sequence
  miRNA Sequence
ccgcccaccgccaggcccc

SEQ ID NO: 843 - RNA, 21 nt, Artificial Sequence
  miRNA Sequence
guuagggccaacaucucuugg

SEQ ID NO: 844 - RNA, 21 nt, Artificial Sequence
  miRNA Sequence
ccaagagauguuggcccuaac

SEQ ID NO: 845 - RNA, 22 nt, Artificial Sequence
  miRNA Sequence
gaggguuggguggaggcucucc

SEQ ID NO: 846 - RNA, 22 nt, Artificial Sequence
  miRNA Sequence
ggagagccuccacccaacccuc

SEQ ID NO: 847 - RNA, 21 nt, Artificial Sequence
  miRNA Sequence
agggcccccccucaauccugu

SEQ ID NO: 848 - RNA, 21 nt, Artificial Sequence
  miRNA Sequence
acaggauugagggggggcccu

SEQ ID NO: 849 - RNA, 23 nt, Artificial Sequence
  miRNA Sequence
agaauugcguuuggacaaucagu

SEQ ID NO: 850 - RNA, 23 nt, Artificial Sequence
  miRNA Sequence
acugauuguccaaacgcaauucu

SEQ ID NO: 851 - RNA, 22 nt, Artificial Sequence
  miRNA Sequence
agauguccagccacaauucucg

SEQ ID NO: 852 - RNA, 22 nt, Artificial Sequence
  miRNA Sequence
cgagaauuguggcuggacaucu

SEQ ID NO: 853 - RNA, 21 nt, Artificial Sequence
  miRNA Sequence
auguaugugugcaugugcaug

SEQ ID NO: 854 - RNA, 21 nt, Artificial Sequence
  miRNA Sequence
caugcacaugcacacauacau

SEQ ID NO: 855 - RNA, 24 nt, Artificial Sequence
  miRNA Sequence
agcagaagcagggagguucuccca

SEQ ID NO: 856 - RNA, 24 nt, Artificial Sequence
  miRNA Sequence
ugggagaaccucccugcuucugcu

SEQ ID NO: 857 - RNA, 22 nt, Artificial Sequence
  miRNA Sequence
uaugugggaugguaaaccgcuu

SEQ ID NO: 858 - RNA, 22 nt, Artificial Sequence
  miRNA Sequence
aagcgguuuaccaucccacaua

SEQ ID NO: 859 - RNA, 22 nt, Artificial Sequence
  miRNA Sequence
ugguuuaccgucccacauacau

SEQ ID NO: 860 - RNA, 22 nt, Artificial Sequence
  miRNA Sequence
auguaugugggacgguaaacca

SEQ ID NO: 861 - RNA, 22 nt, Artificial Sequence
  miRNA Sequence
uagcaccaucugaaaucgguua

SEQ ID NO: 862 - RNA, 22 nt, Artificial Sequence
  miRNA Sequence
uaaccgauuucagauggugcua

SEQ ID NO: 863 - RNA, 22 nt, Artificial Sequence
  miRNA Sequence
acugauuucuuuugguguucag

SEQ ID NO: 864 - RNA, 22 nt, Artificial Sequence
  miRNA Sequence
cugaacaccaaaagaaaucagu

SEQ ID NO: 865 - RNA, 24 nt, Artificial Sequence
  miRNA Sequence
gcugguuucauauggugguuuaga

SEQ ID NO: 866 - RNA, 24 nt, Artificial Sequence
  miRNA Sequence
ucuaaaccaccauaugaaaccagc

SEQ ID NO: 867 - RNA, 22 nt, Artificial Sequence
  miRNA Sequence
cugguuucacaugguggcuuag

SEQ ID NO: 868 - RNA, 22 nt, Artificial Sequence
  miRNA Sequence
cuaagccaccaugugaaaccag

SEQ ID NO: 869 - RNA, 23 nt, Artificial Sequence
  miRNA Sequence
uagcaccauuugaaaucaguguu

SEQ ID NO: 870 - RNA, 23 nt, Artificial Sequence
  miRNA Sequence
aacacugauuucaaauggugcua

SEQ ID NO: 871 - RNA, 22 nt, Artificial Sequence
  miRNA Sequence
uagcaccauuugaaaucgguua

SEQ ID NO: 872 - RNA, 22 nt, Artificial Sequence
  miRNA Sequence
uaaccgauuucaaauggugcua

SEQ ID NO: 873 - RNA, 22 nt, Artificial Sequence
  miRNA Sequence
ugaccgauuucuccugguguuc

SEQ ID NO: 874 - RNA, 22 nt, Artificial Sequence
  miRNA Sequence
gaacaccaggagaaaucgguca

SEQ ID NO: 875 - RNA, 22 nt, Artificial Sequence
  miRNA Sequence
uauacaagggcagacucucucu

SEQ ID NO: 876 - RNA, 22 nt, Artificial Sequence
  miRNA Sequence
agagagagucugcccuuguaua

SEQ ID NO: 877 - RNA, 23 nt, Artificial Sequence
  miRNA Sequence
cagugcaauaguauugucaaagc

SEQ ID NO: 878 - RNA, 23 nt, Artificial Sequence
  miRNA Sequence
gcuuugacaauacuauugcacug

SEQ ID NO: 879 - RNA, 22 nt, Artificial Sequence
  miRNA Sequence
gcucugacuuuauugcacuacu

SEQ ID NO: 880 - RNA, 22 nt, Artificial Sequence
  miRNA Sequence
aguagugcaauaaagucagagc

SEQ ID NO: 881 - RNA, 23 nt, Artificial Sequence
  miRNA Sequence
cagugcaaugauauugucaaagc

SEQ ID NO: 882 - RNA, 23 nt, Artificial Sequence
  miRNA Sequence
gcuuugacaauaucauugcacug

SEQ ID NO: 883 - RNA, 23 nt, Artificial Sequence
  miRNA Sequence
uaagugcuuccauguuuugguga

SEQ ID NO: 884 - RNA, 23 nt, Artificial Sequence
  miRNA Sequence
ucaccaaaacauggaagcacuua

SEQ ID NO: 885 - RNA, 23 nt, Artificial Sequence
  miRNA Sequence
acuuaaacguggauguacuugcu

SEQ ID NO: 886 - RNA, 23 nt, Artificial Sequence
  miRNA Sequence
agcaaguacauccacguuuaagu

SEQ ID NO: 887 - RNA, 23 nt, Artificial Sequence
  miRNA Sequence
uaagugcuuccauguuuuaguag

SEQ ID NO: 888 - RNA, 23 nt, Artificial Sequence
  miRNA Sequence
cuacuaaaacauggaagcacuua

SEQ ID NO: 889 - RNA, 22 nt, Artificial Sequence
  miRNA Sequence
acuuuaacauggaagugcuuuc

SEQ ID NO: 890 - RNA, 22 nt, Artificial Sequence
  miRNA Sequence
gaaagcacuuccauguuaaagu

SEQ ID NO: 891 - RNA, 23 nt, Artificial Sequence
  miRNA Sequence
uaagugcuuccauguuucagugg

SEQ ID NO: 892 - RNA, 23 nt, Artificial Sequence
  miRNA Sequence
ccacugaaacauggaagcacuua

SEQ ID NO: 893 - RNA, 22 nt, Artificial Sequence
  miRNA Sequence
uuuaacauggggguaccugcug

SEQ ID NO: 894 - RNA, 22 nt, Artificial Sequence
  miRNA Sequence
cagcagguacccccauguuaaa

SEQ ID NO: 895 - RNA, 23 nt, Artificial Sequence
  miRNA Sequence
uaagugcuuccauguuugagugu

SEQ ID NO: 896 - RNA, 23 nt, Artificial Sequence
  miRNA Sequence
acacucaaacauggaagcacuua

SEQ ID NO: 897 - RNA, 22 nt, Artificial Sequence
  miRNA Sequence
acuuuaacauggaggcacuugc

SEQ ID NO: 898 - RNA, 22 nt, Artificial Sequence
  miRNA Sequence
gcaagugccuccauguuaaagu

SEQ ID NO: 899 - RNA, 17 nt, Artificial Sequence
  miRNA Sequence
uaagugcuuccaugcuu

SEQ ID NO: 900 - RNA, 17 nt, Artificial Sequence
  miRNA Sequence
aagcauggaagcacuua

SEQ ID NO: 901 - RNA, 17 nt, Artificial Sequence
  miRNA Sequence
uaauugcuuccauguuu

SEQ ID NO: 902 - RNA, 17 nt, Artificial Sequence
  miRNA Sequence
aaacauggaagcaauua

SEQ ID NO: 903 - RNA, 23 nt, Artificial Sequence
  miRNA Sequence
uugccacacugcaacaccuuaca

SEQ ID NO: 904 - RNA, 23 nt, Artificial Sequence
  miRNA Sequence
uguaagguguugcaguguggcaa

SEQ ID NO: 905 - RNA, 21 nt, Artificial Sequence
  miRNA Sequence
ucuggcuguuguggugugcaa

SEQ ID NO: 906 - RNA, 21 nt, Artificial Sequence
  miRNA Sequence
uugcacaccacaacagccaga

SEQ ID NO: 907 - RNA, 23 nt, Artificial Sequence
  miRNA Sequence
ucagcaccaggauauuguuggag

SEQ ID NO: 908 - RNA, 23 nt, Artificial Sequence
  miRNA Sequence
cuccaacaauauccuggugcuga

SEQ ID NO: 909 - RNA, 23 nt, Artificial Sequence
  miRNA Sequence
ucaacaaaaucacugaugcugga

SEQ ID NO: 910 - RNA, 23 nt, Artificial Sequence
  miRNA Sequence
uccagcaucagugauuuuguuga

SEQ ID NO: 911 - RNA, 22 nt, Artificial Sequence
  miRNA Sequence
gauaucagcucaguaggcaccg

SEQ ID NO: 912 - RNA, 22 nt, Artificial Sequence
  miRNA Sequence
cggugccuacugagcugauauc

SEQ ID NO: 913 - RNA, 21 nt, Artificial Sequence
  miRNA Sequence
guuccugcugaacugagccag

SEQ ID NO: 914 - RNA, 21 nt, Artificial Sequence
  miRNA Sequence
cuggcucaguucagcaggaac

SEQ ID NO: 915 - RNA, 22 nt, Artificial Sequence
  miRNA Sequence
cuuucagucggauguuugcagc

SEQ ID NO: 916 - RNA, 22 nt, Artificial Sequence
  miRNA Sequence
gcugcaaacauccgacugaaag

SEQ ID NO: 917 - RNA, 22 nt, Artificial Sequence
  miRNA Sequence
uguaaacauccucgacuggaag

SEQ ID NO: 918 - RNA, 22 nt, Artificial Sequence
  miRNA Sequence
cuuccagucgaggauguuuaca

SEQ ID NO: 919 - RNA, 22 nt, Artificial Sequence
  miRNA Sequence
cugggagguggauguuuacuuc

SEQ ID NO: 920 - RNA, 22 nt, Artificial Sequence
  miRNA Sequence
gaaguaaacauccaccucccag

SEQ ID NO: 921 - RNA, 22 nt, Artificial Sequence
  miRNA Sequence
uguaaacauccuacacucagcu

SEQ ID NO: 922 - RNA, 22 nt, Artificial Sequence
  miRNA Sequence
agcugaguguaggauguuuaca

SEQ ID NO: 923 - RNA, 22 nt, Artificial Sequence
  miRNA Sequence
cugggagaggguuguuuacucc

SEQ ID NO: 924 - RNA, 22 nt, Artificial Sequence
  miRNA Sequence
ggaguaaacaacccucucccag

SEQ ID NO: 925 - RNA, 22 nt, Artificial Sequence
  miRNA Sequence
cugggagaaggcuguuuacucu

SEQ ID NO: 926 - RNA, 22 nt, Artificial Sequence
  miRNA Sequence
agaguaaacagccuucucccag

SEQ ID NO: 927 - RNA, 23 nt, Artificial Sequence
  miRNA Sequence
uguaaacauccuacacucucagc

SEQ ID NO: 928 - RNA, 23 nt, Artificial Sequence
  miRNA Sequence
gcugagaguguaggauguuuaca

SEQ ID NO: 929 - RNA, 22 nt, Artificial Sequence
  miRNA Sequence
cuuucagucagauguuugcugc

SEQ ID NO: 930 - RNA, 22 nt, Artificial Sequence
  miRNA Sequence
gcagcaaacaucugacugaaag

SEQ ID NO: 931 - RNA, 22 nt, Artificial Sequence
  miRNA Sequence
uguaaacauccccgacuggaag

SEQ ID NO: 932 - RNA, 22 nt, Artificial Sequence
  miRNA Sequence
cuuccagucggggauguuuaca

SEQ ID NO: 933 - RNA, 22 nt, Artificial Sequence
  miRNA Sequence
cuuucagucggauguuuacagc

SEQ ID NO: 934 - RNA, 22 nt, Artificial Sequence
  miRNA Sequence
gcuguaaacauccgacugaaag

SEQ ID NO: 935 - RNA, 22 nt, Artificial Sequence
  miRNA Sequence
uguaaacauccuugacuggaag

SEQ ID NO: 936 - RNA, 22 nt, Artificial Sequence
  miRNA Sequence
cuuccagucaaggauguuuaca

SEQ ID NO: 937 - RNA, 22 nt, Artificial Sequence
  miRNA Sequence
ugcuaugccaacauauugccau

SEQ ID NO: 938 - RNA, 22 nt, Artificial Sequence
  miRNA Sequence
auggcaauauguuggcauagca

SEQ ID NO: 939 - RNA, 21 nt, Artificial Sequence
  miRNA Sequence
aggcaagaugcuggcauagcu

SEQ ID NO: 940 - RNA, 21 nt, Artificial Sequence
  miRNA Sequence
agcuaugccagcaucuugccu

SEQ ID NO: 941 - RNA, 20 nt, Artificial Sequence
  miRNA Sequence
auauggguuuacuaguuggu

SEQ ID NO: 942 - RNA, 20 nt, Artificial Sequence
  miRNA Sequence
accaacuaguaaacccauau

SEQ ID NO: 943 - RNA, 22 nt, Artificial Sequence
  miRNA Sequence
ugccuggaacauaguagggacu

SEQ ID NO: 944 - RNA, 22 nt, Artificial Sequence
  miRNA Sequence
agucccuacuauguuccaggca

SEQ ID NO: 945 - RNA, 21 nt, Artificial Sequence
  miRNA Sequence
auaggacucauauagugccag

SEQ ID NO: 946 - RNA, 21 nt, Artificial Sequence
  miRNA Sequence
cuggcacuauaugaguccuau

SEQ ID NO: 947 - RNA, 20 nt, Artificial Sequence
  miRNA Sequence
agacacuauacgagucauau

SEQ ID NO: 948 - RNA, 20 nt, Artificial Sequence
  miRNA Sequence
auaugacucguauagugucu

SEQ ID NO: 949 - RNA, 23 nt, Artificial Sequence
  miRNA Sequence
ugugacugcauuaugaaaauucu

SEQ ID NO: 950 - RNA, 23 nt, Artificial Sequence
  miRNA Sequence
agaauuuucauaaugcagucaca

SEQ ID NO: 951 - RNA, 20 nt, Artificial Sequence
  miRNA Sequence
uggcuuuuaacuuugauggc

SEQ ID NO: 952 - RNA, 20 nt, Artificial Sequence
  miRNA Sequence
gccaucaaaguuaaaagcca

SEQ ID NO: 953 - RNA, 21 nt, Artificial Sequence
  miRNA Sequence
cacagcaaguguagacaggca

SEQ ID NO: 954 - RNA, 21 nt, Artificial Sequence
  miRNA Sequence
ugccugucuacacuugcugug

SEQ ID NO: 955 - RNA, 21 nt, Artificial Sequence
  miRNA Sequence
ccugucugugccugcuguaca

SEQ ID NO: 956 - RNA, 21 nt, Artificial Sequence
  miRNA Sequence
uguacagcaggcacagacagg

SEQ ID NO: 957 - RNA, 22 nt, Artificial Sequence
  miRNA Sequence
uaaauagaguaggcaaaggaca

SEQ ID NO: 958 - RNA, 22 nt, Artificial Sequence
  miRNA Sequence
uguccuuugccuacucuauuua

SEQ ID NO: 959 - RNA, 22 nt, Artificial Sequence
  miRNA Sequence
uccuuugccuauucuauuuaag

SEQ ID NO: 960 - RNA, 22 nt, Artificial Sequence
  miRNA Sequence
cuuaaauagaauaggcaaagga

SEQ ID NO: 961 - RNA, 22 nt, Artificial Sequence
  miRNA Sequence
guugggacaagaggacggucuu

SEQ ID NO: 962 - RNA, 22 nt, Artificial Sequence
  miRNA Sequence
aagaccguccucuugucccaac

SEQ ID NO: 963 - RNA, 17 nt, Artificial Sequence
  miRNA Sequence
cagagaauuguuuaauc

SEQ ID NO: 964 - RNA, 17 nt, Artificial Sequence
  miRNA Sequence
gauuaaacaauucucug

SEQ ID NO: 965 - RNA, 22 nt, Artificial Sequence
  miRNA Sequence
acuuuccucacucccgugaagu

SEQ ID NO: 966 - RNA, 22 nt, Artificial Sequence
  miRNA Sequence
acuucacgggagugaggaaagu

SEQ ID NO: 967 - RNA, 21 nt, Artificial Sequence
  miRNA Sequence
uucgcgggcgaaggcaaaguc

SEQ ID NO: 968 - RNA, 21 nt, Artificial Sequence
  miRNA Sequence
gacuuugccuucgcccgcgaa

SEQ ID NO: 969 - RNA, 20 nt, Artificial Sequence
  miRNA Sequence
uagaggaagcuguggagaga

SEQ ID NO: 970 - RNA, 20 nt, Artificial Sequence
  miRNA Sequence
ucucuccacagcuuccucua

SEQ ID NO: 971 - RNA, 22 nt, Artificial Sequence
  miRNA Sequence
caucuggcauccgucacacaga

SEQ ID NO: 972 - RNA, 22 nt, Artificial Sequence
  miRNA Sequence
ucugugugacggaugccagaug

SEQ ID NO: 973 - RNA, 22 nt, Artificial Sequence
  miRNA Sequence
ugagggacagaugccagaagca

SEQ ID NO: 974 - RNA, 22 nt, Artificial Sequence
  miRNA Sequence
ugcuucuggcaucugucccuca

SEQ ID NO: 975 - RNA, 22 nt, Artificial Sequence
  miRNA Sequence
uccccuucugcaggccugcugg

SEQ ID NO: 976 - RNA, 22 nt, Artificial Sequence
  miRNA Sequence
ccagcaggccugcagaagggga

SEQ ID NO: 977 - RNA, 23 nt, Artificial Sequence
  miRNA Sequence
aucagggcuuguggaaugggaag

SEQ ID NO: 978 - RNA, 23 nt, Artificial Sequence
  miRNA Sequence
cuucccauuccacaagcccugau

SEQ ID NO: 979 - RNA, 23 nt, Artificial Sequence
  miRNA Sequence
ucuggcaaguaaaaaacucucau

SEQ ID NO: 980 - RNA, 23 nt, Artificial Sequence
  miRNA Sequence
augagaguuuuuuacuugccaga

SEQ ID NO: 981 - RNA, 22 nt, Artificial Sequence
  miRNA Sequence
aaacuaaucucuacacugcugc

SEQ ID NO: 982 - RNA, 22 nt, Artificial Sequence
  miRNA Sequence
gcagcaguguagagauuaguuu

SEQ ID NO: 983 - RNA, 22 nt, Artificial Sequence
  miRNA Sequence
gcaguaguguagagauugguuu

SEQ ID NO: 984 - RNA, 22 nt, Artificial Sequence
  miRNA Sequence
aaaccaaucucuacacuacugc

SEQ ID NO: 985 - RNA, 21 nt, Artificial Sequence
  miRNA Sequence
gcugcaccggagacuggguaa

SEQ ID NO: 986 - RNA, 21 nt, Artificial Sequence
  miRNA Sequence
uuacccagucuccggugcagc

SEQ ID NO: 987 - RNA, 21 nt, Artificial Sequence
  miRNA Sequence
uacccagucuccggugcagcc

SEQ ID NO: 988 - RNA, 21 nt, Artificial Sequence
  miRNA Sequence
ggcugcaccggagacugggua

SEQ ID NO: 989 - RNA, 23 nt, Artificial Sequence
  miRNA Sequence
ucgaggacugguggaagggccuu

SEQ ID NO: 990 - RNA, 23 nt, Artificial Sequence
  miRNA Sequence
aaggcccuuccaccaguccucga

SEQ ID NO: 991 - RNA, 24 nt, Artificial Sequence
  miRNA Sequence
uggguagagaaggagcucagagga

SEQ ID NO: 992 - RNA, 24 nt, Artificial Sequence
  miRNA Sequence
uccucugagcuccuucucuaccca

SEQ ID NO: 993 - RNA, 22 nt, Artificial Sequence
  miRNA Sequence
uaaagaacucuuaaaacccaau

SEQ ID NO: 994 - RNA, 22 nt, Artificial Sequence
  miRNA Sequence
auuggguuuuaagaguucuuua

SEQ ID NO: 995 - RNA, 23 nt, Artificial Sequence
  miRNA Sequence
ugauggauaaaagacuacauauu

SEQ ID NO: 996 - RNA, 23 nt, Artificial Sequence
  miRNA Sequence
aauauguagucuuuuauccauca

SEQ ID NO: 997 - RNA, 22 nt, Artificial Sequence
  miRNA Sequence
ugccuaggcugagacugcagug

SEQ ID NO: 998 - RNA, 22 nt, Artificial Sequence
  miRNA Sequence
cacugcagucucagccuaggca

SEQ ID NO: 999 - RNA, 22 nt, Artificial Sequence
  miRNA Sequence
ggcuggagcgagugcaguggug

SEQ ID NO: 1000 - RNA, 22 nt, Artificial Sequence
  miRNA Sequence
caccacugcacucgcuccagcc

SEQ ID NO: 1001 - RNA, 22 nt, Artificial Sequence
  miRNA Sequence
uggcccaaccuauucaguuagu

SEQ ID NO: 1002 - RNA, 22 nt, Artificial Sequence
  miRNA Sequence
acuaacugaauagguugggcca

SEQ ID NO: 1003 - RNA, 23 nt, Artificial Sequence
  miRNA Sequence
cugacugaauagguagggucauu

SEQ ID NO: 1004 - RNA, 23 nt, Artificial Sequence
  miRNA Sequence
aaugacccuaccuauucagucag

SEQ ID NO: 1005 - RNA, 24 nt, Artificial Sequence
  miRNA Sequence
ucuguagccugggagcaauggggu

SEQ ID NO: 1006 - RNA, 24 nt, Artificial Sequence
  miRNA Sequence
accccauugcucccaggcuacaga

SEQ ID NO: 1007 - RNA, 24 nt, Artificial Sequence
  miRNA Sequence
uguggacagugagguagagggagu

SEQ ID NO: 1008 - RNA, 24 nt, Artificial Sequence
  miRNA Sequence
acucccucuaccucacuguccaca

SEQ ID NO: 1009 - RNA, 23 nt, Artificial Sequence
  miRNA Sequence
uaggagcucaacagaugccuguu

SEQ ID NO: 1010 - RNA, 23 nt, Artificial Sequence
  miRNA Sequence
aacaggcaucuguugagcuccua

SEQ ID NO: 1011 - RNA, 22 nt, Artificial Sequence
  miRNA Sequence
agcuuuugggaauucagguagu

SEQ ID NO: 1012 - RNA, 22 nt, Artificial Sequence
  miRNA Sequence
acuaccugaauucccaaaagcu

SEQ ID NO: 1013 - RNA, 21 nt, Artificial Sequence
  miRNA Sequence
accugaauuaccaaaagcuuu

SEQ ID NO: 1014 - RNA, 21 nt, Artificial Sequence
  miRNA Sequence
aaagcuuuugguaauucaggu

SEQ ID NO: 1015 - RNA, 19 nt, Artificial Sequence
  miRNA Sequence
gagggcggguggaggagga

SEQ ID NO: 1016 - RNA, 19 nt, Artificial Sequence
  miRNA Sequence
uccuccuccacccgcccuc

SEQ ID NO: 1017 - RNA, 22 nt, Artificial Sequence
  miRNA Sequence
aaggccuuucugaaccuucaga

SEQ ID NO: 1018 - RNA, 22 nt, Artificial Sequence
  miRNA Sequence
ucugaagguucagaaaggccuu

SEQ ID NO: 1019 - RNA, 25 nt, Artificial Sequence
  miRNA Sequence
auaacauuguaaagcgcuucuuucg

SEQ ID NO: 1020 - RNA, 25 nt, Artificial Sequence
  miRNA Sequence
cgaaagaagcgcuuuacaauguuau

SEQ ID NO: 1021 - RNA, 22 nt, Artificial Sequence
  miRNA Sequence
auauaccuguucggucucuuua

SEQ ID NO: 1022 - RNA, 22 nt, Artificial Sequence
  miRNA Sequence
uaaagagaccgaacagguauau

SEQ ID NO: 1023 - RNA, 22 nt, Artificial Sequence
  miRNA Sequence
aggggaccaaagagauauauag

SEQ ID NO: 1024 - RNA, 22 nt, Artificial Sequence
  miRNA Sequence
cuauauaucucuuugguccccu

SEQ ID NO: 1025 - RNA, 24 nt, Artificial Sequence
  miRNA Sequence
agauauuuugaguguuuggaauug

SEQ ID NO: 1026 - RNA, 24 nt, Artificial Sequence
  miRNA Sequence
caauuccaaacacucaaaauaucu

SEQ ID NO: 1027 - RNA, 22 nt, Artificial Sequence
  miRNA Sequence
aacuccaaacacucaaaacuca

SEQ ID NO: 1028 - RNA, 22 nt, Artificial Sequence
  miRNA Sequence
ugaguuuugaguguuuggaguu

SEQ ID NO: 1029 - RNA, 22 nt, Artificial Sequence
  miRNA Sequence
caugcuaggauagaaagaaugg

SEQ ID NO: 1030 - RNA, 22 nt, Artificial Sequence
  miRNA Sequence
ccauucuuucuauccuagcaug

SEQ ID NO: 1031 - RNA, 24 nt, Artificial Sequence
  miRNA Sequence
gguugggcagugaggaggguguga

SEQ ID NO: 1032 - RNA, 24 nt, Artificial Sequence
  miRNA Sequence
ucacacccuccucacugcccaacc

SEQ ID NO: 1033 - RNA, 22 nt, Artificial Sequence
  miRNA Sequence
uggaaaaaacuggugugugcuu

SEQ ID NO: 1034 - RNA, 22 nt, Artificial Sequence
  miRNA Sequence
aagcacacaccaguuuuuucca

SEQ ID NO: 1035 - RNA, 23 nt, Artificial Sequence
  miRNA Sequence
uuuguauggauauguguguguau

SEQ ID NO: 1036 - RNA, 23 nt, Artificial Sequence
  miRNA Sequence
auacacacacauauccauacaaa

SEQ ID NO: 1037 - RNA, 22 nt, Artificial Sequence
  miRNA Sequence
cuggggagauccucgagguugg

SEQ ID NO: 1038 - RNA, 22 nt, Artificial Sequence
  miRNA Sequence
ccaaccucgaggaucuccccag

SEQ ID NO: 1039 - RNA, 22 nt, Artificial Sequence
  miRNA Sequence
caaccucgacgaucuccucagc

SEQ ID NO: 1040 - RNA, 22 nt, Artificial Sequence
  miRNA Sequence
gcugaggagaucgucgagguug

SEQ ID NO: 1041 - RNA, 21 nt, Artificial Sequence
  miRNA Sequence
ugaggagaucgucgagguugg

SEQ ID NO: 1042 - RNA, 21 nt, Artificial Sequence
  miRNA Sequence
ccaaccucgacgaucuccuca

SEQ ID NO: 1043 - RNA, 22 nt, Artificial Sequence
  miRNA Sequence
caaccucgaggaucuccccagc

SEQ ID NO: 1044 - RNA, 22 nt, Artificial Sequence
  miRNA Sequence
gcuggggagauccucgagguug

SEQ ID NO: 1045 - RNA, 21 nt, Artificial Sequence
  miRNA Sequence
gguggggcaaugggaucaggu

SEQ ID NO: 1046 - RNA, 21 nt, Artificial Sequence
  miRNA Sequence
accugaucccauugccccacc

SEQ ID NO: 1047 - RNA, 22 nt, Artificial Sequence
  miRNA Sequence
uguguuagaauaggggcaauaa

SEQ ID NO: 1048 - RNA, 22 nt, Artificial Sequence
  miRNA Sequence
uuauugccccuauucuaacaca

SEQ ID NO: 1049 - RNA, 22 nt, Artificial Sequence
  miRNA Sequence
auugccucuguucuaacacaag

SEQ ID NO: 1050 - RNA, 22 nt, Artificial Sequence
  miRNA Sequence
cuuguguuagaacagaggcaau

SEQ ID NO: 1051 - RNA, 23 nt, Artificial Sequence
  miRNA Sequence
ggggaaagcgaguagggacauuu

SEQ ID NO: 1052 - RNA, 23 nt, Artificial Sequence
  miRNA Sequence
aaaugucccuacucgcuuucccc

SEQ ID NO: 1053 - RNA, 22 nt, Artificial Sequence
  miRNA Sequence
cagaaggggaguugggagcaga

SEQ ID NO: 1054 - RNA, 22 nt, Artificial Sequence
  miRNA Sequence
ucugcucccaacuccccuucug

SEQ ID NO: 1055 - RNA, 21 nt, Artificial Sequence
  miRNA Sequence
ccaggcucugcagugggaacu

SEQ ID NO: 1056 - RNA, 21 nt, Artificial Sequence
  miRNA Sequence
aguucccacugcagagccugg

SEQ ID NO: 1057 - RNA, 18 nt, Artificial Sequence
  miRNA Sequence
ccaggcucugcaguggga

SEQ ID NO: 1058 - RNA, 18 nt, Artificial Sequence
  miRNA Sequence
ucccacugcagagccugg

SEQ ID NO: 1059 - RNA, 21 nt, Artificial Sequence
  miRNA Sequence
cucccacuuccagaucuuucu

SEQ ID NO: 1060 - RNA, 21 nt, Artificial Sequence
  miRNA Sequence
agaaagaucuggaagugggag

SEQ ID NO: 1061 - RNA, 22 nt, Artificial Sequence
  miRNA Sequence
aaagaucuggaagugggagaca

SEQ ID NO: 1062 - RNA, 22 nt, Artificial Sequence
  miRNA Sequence
ugucucccacuuccagaucuuu

SEQ ID NO: 1063 - RNA, 22 nt, Artificial Sequence
  miRNA Sequence
cugcccuagucuagcugaagcu

SEQ ID NO: 1064 - RNA, 22 nt, Artificial Sequence
  miRNA Sequence
agcuucagcuagacuagggcag

SEQ ID NO: 1065 - RNA, 22 nt, Artificial Sequence
  miRNA Sequence
uucagccaggcuagugcagucu

SEQ ID NO: 1066 - RNA, 22 nt, Artificial Sequence
  miRNA Sequence
agacugcacuagccuggcugaa

SEQ ID NO: 1067 - RNA, 22 nt, Artificial Sequence
  miRNA Sequence
aagggcuuccucucugcaggac

SEQ ID NO: 1068 - RNA, 22 nt, Artificial Sequence
  miRNA Sequence
guccugcagagaggaagcccuu

SEQ ID NO: 1069 - RNA, 21 nt, Artificial Sequence
  miRNA Sequence
ccugcagagaggaagcccuuc

SEQ ID NO: 1070 - RNA, 21 nt, Artificial Sequence
  miRNA Sequence
gaagggcuuccucucugcagg

SEQ ID NO: 1071 - RNA, 22 nt, Artificial Sequence
  miRNA Sequence
uaggauuacaagugucggccac

SEQ ID NO: 1072 - RNA, 22 nt, Artificial Sequence
  miRNA Sequence
guggccgacacuuguaauccua

SEQ ID NO: 1073 - RNA, 22 nt, Artificial Sequence
  miRNA Sequence
agagcugagacuagaaagccca

SEQ ID NO: 1074 - RNA, 22 nt, Artificial Sequence
  miRNA Sequence
ugggcuuucuagucucagcucu

SEQ ID NO: 1075 - RNA, 22 nt, Artificial Sequence
  miRNA Sequence
ggcuuucuagucucagcucucc

SEQ ID NO: 1076 - RNA, 22 nt, Artificial Sequence
  miRNA Sequence
ggagagcugagacuagaaagcc

SEQ ID NO: 1077 - RNA, 23 nt, Artificial Sequence
  miRNA Sequence
cugauaagaacagaggcccagau

SEQ ID NO: 1078 - RNA, 23 nt, Artificial Sequence
  miRNA Sequence
aucugggccucuguucuuaucag

SEQ ID NO: 1079 - RNA, 21 nt, Artificial Sequence
  miRNA Sequence
ucccuaccccuccacucccca

SEQ ID NO: 1080 - RNA, 21 nt, Artificial Sequence
  miRNA Sequence
uggggaguggagggguaggga

SEQ ID NO: 1081 - RNA, 23 nt, Artificial Sequence
  miRNA Sequence
uuagggaguagaaggguggggag

SEQ ID NO: 1082 - RNA, 23 nt, Artificial Sequence
  miRNA Sequence
cuccccacccuucuacucccuaa

SEQ ID NO: 1083 - RNA, 22 nt, Artificial Sequence
  miRNA Sequence
uauaaaaugagggcaguaagac

SEQ ID NO: 1084 - RNA, 22 nt, Artificial Sequence
  miRNA Sequence
gucuuacugcccucauuuuaua

SEQ ID NO: 1085 - RNA, 22 nt, Artificial Sequence
  miRNA Sequence
ugugacuuuaagggaaauggcg

SEQ ID NO: 1086 - RNA, 22 nt, Artificial Sequence
  miRNA Sequence
cgccauuucccuuaaagucaca

SEQ ID NO: 1087 - RNA, 22 nt, Artificial Sequence
  miRNA Sequence
agguggaugcaaugugaccuca

SEQ ID NO: 1088 - RNA, 22 nt, Artificial Sequence
  miRNA Sequence
ugaggucacauugcauccaccu

SEQ ID NO: 1089 - RNA, 23 nt, Artificial Sequence
  miRNA Sequence
cgcagacaaugccuacuggccua

SEQ ID NO: 1090 - RNA, 23 nt, Artificial Sequence
  miRNA Sequence
uaggccaguaggcauugucugcg

SEQ ID NO: 1091 - RNA, 22 nt, Artificial Sequence
  miRNA Sequence
aggauuucagaaauacuggugu

SEQ ID NO: 1092 - RNA, 22 nt, Artificial Sequence
  miRNA Sequence
acaccaguauuucugaaauccu

SEQ ID NO: 1093 - RNA, 17 nt, Artificial Sequence
  miRNA Sequence
gaguucuacagucagac

SEQ ID NO: 1094 - RNA, 17 nt, Artificial Sequence
  miRNA Sequence
gucugacuguagaacuc

SEQ ID NO: 1095 - RNA, 22 nt, Artificial Sequence
  miRNA Sequence
uaggacugugcuuggcacauag

SEQ ID NO: 1096 - RNA, 22 nt, Artificial Sequence
  miRNA Sequence
cuaugugccaagcacaguccua

SEQ ID NO: 1097 - RNA, 22 nt, Artificial Sequence
  miRNA Sequence
cugggguucugagacagacagu

SEQ ID NO: 1098 - RNA, 22 nt, Artificial Sequence
  miRNA Sequence
acugucugucucagaaccccag

SEQ ID NO: 1099 - RNA, 24 nt, Artificial Sequence
  miRNA Sequence
agauguauggaaucuguauauauc

SEQ ID NO: 1100 - RNA, 24 nt, Artificial Sequence
  miRNA Sequence
gauauauacagauuccauacaucu

SEQ ID NO: 1101 - RNA, 22 nt, Artificial Sequence
  miRNA Sequence
aaaggaggaaauaggcaggcca

SEQ ID NO: 1102 - RNA, 22 nt, Artificial Sequence
  miRNA Sequence
uggccugccuauuuccuccuuu

SEQ ID NO: 1103 - RNA, 22 nt, Artificial Sequence
  miRNA Sequence
ugcccugccuguuuucuccuuu

SEQ ID NO: 1104 - RNA, 22 nt, Artificial Sequence
  miRNA Sequence
aaaggagaaaacaggcagggca

SEQ ID NO: 1105 - RNA, 23 nt, Artificial Sequence
  miRNA Sequence
uagugaguuagagaugcagagcc

SEQ ID NO: 1106 - RNA, 23 nt, Artificial Sequence
  miRNA Sequence
ggcucugcaucucuaacucacua

SEQ ID NO: 1107 - RNA, 22 nt, Artificial Sequence
  miRNA Sequence
cggggagagaacgcagugacgu

SEQ ID NO: 1108 - RNA, 22 nt, Artificial Sequence
  miRNA Sequence
acgucacugcguucucuccccg

SEQ ID NO: 1109 - RNA, 19 nt, Artificial Sequence
  miRNA Sequence
acuggccugggacuaccgg

SEQ ID NO: 1110 - RNA, 19 nt, Artificial Sequence
  miRNA Sequence
ccgguagucccaggccagu

SEQ ID NO: 1111 - RNA, 21 nt, Artificial Sequence
  miRNA Sequence
ugcacggcacuggggacacgu

SEQ ID NO: 1112 - RNA, 21 nt, Artificial Sequence
  miRNA Sequence
acguguccccagugccgugca

SEQ ID NO: 1113 - RNA, 23 nt, Artificial Sequence
  miRNA Sequence
uguguacacacgugccaggcgcu

SEQ ID NO: 1114 - RNA, 23 nt, Artificial Sequence
  miRNA Sequence
agcgccuggcacguguguacaca

SEQ ID NO: 1115 - RNA, 17 nt, Artificial Sequence
  miRNA Sequence
ggggcgcggccggaucg

SEQ ID NO: 1116 - RNA, 17 nt, Artificial Sequence
  miRNA Sequence
cgauccggccgcgcccc

SEQ ID NO: 1117 - RNA, 22 nt, Artificial Sequence
  miRNA Sequence
agaaggggugaaauuuaaacgu

SEQ ID NO: 1118 - RNA, 22 nt, Artificial Sequence
  miRNA Sequence
acguuuaaauuucaccccuucu

SEQ ID NO: 1119 - RNA, 19 nt, Artificial Sequence
  miRNA Sequence
uggggcggagcuuccggag

SEQ ID NO: 1120 - RNA, 19 nt, Artificial Sequence
  miRNA Sequence
cuccggaagcuccgcccca

SEQ ID NO: 1121 - RNA, 22 nt, Artificial Sequence
  miRNA Sequence
uggggcggagcuuccggaggcc

SEQ ID NO: 1122 - RNA, 22 nt, Artificial Sequence
  miRNA Sequence
ggccuccggaagcuccgcccca

SEQ ID NO: 1123 - RNA, 25 nt, Artificial Sequence
  miRNA Sequence
cuuccagacgcuccgccccacgucg

SEQ ID NO: 1124 - RNA, 25 nt, Artificial Sequence
  miRNA Sequence
cgacguggggcggagcgucuggaag

SEQ ID NO: 1125 - RNA, 19 nt, Artificial Sequence
  miRNA Sequence
aucgggcccucggcgccgg

SEQ ID NO: 1126 - RNA, 19 nt, Artificial Sequence
  miRNA Sequence
ccggcgccgagggcccgau

SEQ ID NO: 1127 - RNA, 17 nt, Artificial Sequence
  miRNA Sequence
gcuucuguaguguaguc

SEQ ID NO: 1128 - RNA, 17 nt, Artificial Sequence
  miRNA Sequence
gacuacacuacagaagc

SEQ ID NO: 1129 - RNA, 22 nt, Artificial Sequence
  miRNA Sequence
gccucucucggagucgcucgga

SEQ ID NO: 1130 - RNA, 22 nt, Artificial Sequence
  miRNA Sequence
uccgagcgacuccgagagaggc

SEQ ID NO: 1131 - RNA, 23 nt, Artificial Sequence
  miRNA Sequence
aaagucucgcucucugccccuca

SEQ ID NO: 1132 - RNA, 23 nt, Artificial Sequence
  miRNA Sequence
ugaggggcagagagcgagacuuu

SEQ ID NO: 1133 - RNA, 24 nt, Artificial Sequence
  miRNA Sequence
ugaggggccucagaccgagcuuuu

SEQ ID NO: 1134 - RNA, 24 nt, Artificial Sequence
  miRNA Sequence
aaaagcucggucugaggccccuca

SEQ ID NO: 1135 - RNA, 23 nt, Artificial Sequence
  miRNA Sequence
agaagaaggcggucggucugcgg

SEQ ID NO: 1136 - RNA, 23 nt, Artificial Sequence
  miRNA Sequence
ccgcagaccgaccgccuucuucu

SEQ ID NO: 1137 - RNA, 21 nt, Artificial Sequence
  miRNA Sequence
ucacgcggagagauggcuuug

SEQ ID NO: 1138 - RNA, 21 nt, Artificial Sequence
  miRNA Sequence
caaagccaucucuccgcguga

SEQ ID NO: 1139 - RNA, 22 nt, Artificial Sequence
  miRNA Sequence
caggcgucugucuacguggcuu

SEQ ID NO: 1140 - RNA, 22 nt, Artificial Sequence
  miRNA Sequence
aagccacguagacagacgccug

SEQ ID NO: 1141 - RNA, 20 nt, Artificial Sequence
  miRNA Sequence
uuggccauggggcugcgcgg

SEQ ID NO: 1142 - RNA, 20 nt, Artificial Sequence
  miRNA Sequence
ccgcgcagccccauggccaa

SEQ ID NO: 1143 - RNA, 23 nt, Artificial Sequence
  miRNA Sequence
ccugggcagcguguggcugaagg

SEQ ID NO: 1144 - RNA, 23 nt, Artificial Sequence
  miRNA Sequence
ccuucagccacacgcugcccagg

SEQ ID NO: 1145 - RNA, 23 nt, Artificial Sequence
  miRNA Sequence
agaggcuuugugcggauacgggg

SEQ ID NO: 1146 - RNA, 23 nt, Artificial Sequence
  miRNA Sequence
ccccguauccgcacaaagccucu

SEQ ID NO: 1147 - RNA, 21 nt, Artificial Sequence
  miRNA Sequence
cccuugggucugaugggguag

SEQ ID NO: 1148 - RNA, 21 nt, Artificial Sequence
  miRNA Sequence
cuaccccaucagacccaaggg

SEQ ID NO: 1149 - RNA, 25 nt, Artificial Sequence
  miRNA Sequence
ugccccaucugugcccuggguagga

SEQ ID NO: 1150 - RNA, 25 nt, Artificial Sequence
  miRNA Sequence
uccuacccagggcacagauggggca

SEQ ID NO: 1151 - RNA, 23 nt, Artificial Sequence
  miRNA Sequence
uguggaagguagacggccagaga

SEQ ID NO: 1152 - RNA, 23 nt, Artificial Sequence
  miRNA Sequence
ucucuggccgucuaccuuccaca

SEQ ID NO: 1153 - RNA, 20 nt, Artificial Sequence
  miRNA Sequence
ucuggccagcuacgucccca

SEQ ID NO: 1154 - RNA, 20 nt, Artificial Sequence
  miRNA Sequence
uggggacguagcuggccaga

SEQ ID NO: 1155 - RNA, 23 nt, Artificial Sequence
  miRNA Sequence
uggggacguagcuggccagacag

SEQ ID NO: 1156 - RNA, 23 nt, Artificial Sequence
  miRNA Sequence
cugucuggccagcuacgucccca

SEQ ID NO: 1157 - RNA, 22 nt, Artificial Sequence
  miRNA Sequence
cucucuggccgucuaccuucca

SEQ ID NO: 1158 - RNA, 22 nt, Artificial Sequence
  miRNA Sequence
uggaagguagacggccagagag

SEQ ID NO: 1159 - RNA, 23 nt, Artificial Sequence
  miRNA Sequence
ucugggagguuguagcaguggaa

SEQ ID NO: 1160 - RNA, 23 nt, Artificial Sequence
  miRNA Sequence
uuccacugcuacaaccucccaga

SEQ ID NO: 1161 - RNA, 22 nt, Artificial Sequence
  miRNA Sequence
uccugcguaggaucugaggagu

SEQ ID NO: 1162 - RNA, 22 nt, Artificial Sequence
  miRNA Sequence
acuccucagauccuacgcagga

SEQ ID NO: 1163 - RNA, 22 nt, Artificial Sequence
  miRNA Sequence
agcucugcugcucacuggcagu

SEQ ID NO: 1164 - RNA, 22 nt, Artificial Sequence
  miRNA Sequence
acugccagugagcagcagagcu

SEQ ID NO: 1165 - RNA, 21 nt, Artificial Sequence
  miRNA Sequence
ggccagccaccaggagggcug

SEQ ID NO: 1166 - RNA, 21 nt, Artificial Sequence
  miRNA Sequence
cagcccuccugguggcuggcc

SEQ ID NO: 1167 - RNA, 17 nt, Artificial Sequence
  miRNA Sequence
cgcgccgggcccggguu

SEQ ID NO: 1168 - RNA, 17 nt, Artificial Sequence
  miRNA Sequence
aacccgggcccggcgcg

SEQ ID NO: 1169 - RNA, 18 nt, Artificial Sequence
  miRNA Sequence
cggggcggcaggggccuc

SEQ ID NO: 1170 - RNA, 18 nt, Artificial Sequence
  miRNA Sequence
gaggccccugccgccccg

SEQ ID NO: 1171 - RNA, 23 nt, Artificial Sequence
  miRNA Sequence
ggaggcgcaggcucggaaaggcg

SEQ ID NO: 1172 - RNA, 23 nt, Artificial Sequence
  miRNA Sequence
cgccuuuccgagccugcgccucc

SEQ ID NO: 1173 - RNA, 22 nt, Artificial Sequence
  miRNA Sequence
guggaguccuggggaauggaga

SEQ ID NO: 1174 - RNA, 22 nt, Artificial Sequence
  miRNA Sequence
ucuccauuccccaggacuccac

SEQ ID NO: 1175 - RNA, 23 nt, Artificial Sequence
  miRNA Sequence
agggacugccuuaggagaaaguu

SEQ ID NO: 1176 - RNA, 23 nt, Artificial Sequence
  miRNA Sequence
aacuuucuccuaaggcagucccu

SEQ ID NO: 1177 - RNA, 22 nt, Artificial Sequence
  miRNA Sequence
caauuuagugugugugauauuu

SEQ ID NO: 1178 - RNA, 22 nt, Artificial Sequence
  miRNA Sequence
aaauaucacacacacuaaauug

SEQ ID NO: 1179 - RNA, 22 nt, Artificial Sequence
  miRNA Sequence
uauugcacauuacuaaguugca

SEQ ID NO: 1180 - RNA, 22 nt, Artificial Sequence
  miRNA Sequence
ugcaacuuaguaaugugcaaua

SEQ ID NO: 1181 - RNA, 22 nt, Artificial Sequence
  miRNA Sequence
caccuugcgcuacucaggucug

SEQ ID NO: 1182 - RNA, 22 nt, Artificial Sequence
  miRNA Sequence
cagaccugaguagcgcaaggug

SEQ ID NO: 1183 - RNA, 22 nt, Artificial Sequence
  miRNA Sequence
aaucugagaaggcgcacaaggu

SEQ ID NO: 1184 - RNA, 22 nt, Artificial Sequence
  miRNA Sequence
accuugugcgccuucucagauu

SEQ ID NO: 1185 - RNA, 17 nt, Artificial Sequence
  miRNA Sequence
gggauaugaagaaaaau

SEQ ID NO: 1186 - RNA, 17 nt, Artificial Sequence
  miRNA Sequence
auuuuucuucauauccc

SEQ ID NO: 1187 - RNA, 22 nt, Artificial Sequence
  miRNA Sequence
uggaagggagaagagcuuuaau

SEQ ID NO: 1188 - RNA, 22 nt, Artificial Sequence
  miRNA Sequence
auuaaagcucuucucccuucca

SEQ ID NO: 1189 - RNA, 22 nt, Artificial Sequence
  miRNA Sequence
aaaagcuggguugagagggcga

SEQ ID NO: 1190 - RNA, 22 nt, Artificial Sequence
  miRNA Sequence
ucgcccucucaacccagcuuuu

SEQ ID NO: 1191 - RNA, 22 nt, Artificial Sequence
  miRNA Sequence
aaaagcuggguugagagggcaa

SEQ ID NO: 1192 - RNA, 22 nt, Artificial Sequence
  miRNA Sequence
uugcccucucaacccagcuuuu

SEQ ID NO: 1193 - RNA, 20 nt, Artificial Sequence
  miRNA Sequence
aaaagcuggguugagagggu

SEQ ID NO: 1194 - RNA, 20 nt, Artificial Sequence
  miRNA Sequence
acccucucaacccagcuuuu

SEQ ID NO: 1195 - RNA, 19 nt, Artificial Sequence
  miRNA Sequence
aaaagcuggguugagagga

SEQ ID NO: 1196 - RNA, 19 nt, Artificial Sequence
  miRNA Sequence
uccucucaacccagcuuuu

SEQ ID NO: 1197 - RNA, 18 nt, Artificial Sequence
  miRNA Sequence
aaagcuggguugagaagg

SEQ ID NO: 1198 - RNA, 18 nt, Artificial Sequence
  miRNA Sequence
ccuucucaacccagcuuu

SEQ ID NO: 1199 - RNA, 21 nt, Artificial Sequence
  miRNA Sequence
cacauuacacggucgaccucu

SEQ ID NO: 1200 - RNA, 21 nt, Artificial Sequence
  miRNA Sequence
agaggucgaccguguaaugug

SEQ ID NO: 1201 - RNA, 22 nt, Artificial Sequence
  miRNA Sequence
aggugguccguggcgcguucgc

SEQ ID NO: 1202 - RNA, 22 nt, Artificial Sequence
  miRNA Sequence
gcgaacgcgccacggaccaccu

SEQ ID NO: 1203 - RNA, 22 nt, Artificial Sequence
  miRNA Sequence
cccaauacacggucgaccucuu

SEQ ID NO: 1204 - RNA, 22 nt, Artificial Sequence
  miRNA Sequence
aagaggucgaccguguauuggg

SEQ ID NO: 1205 - RNA, 23 nt, Artificial Sequence
  miRNA Sequence
agguuguccguggugaguucgca

SEQ ID NO: 1206 - RNA, 23 nt, Artificial Sequence
  miRNA Sequence
ugcgaacucaccacggacaaccu

SEQ ID NO: 1207 - RNA, 20 nt, Artificial Sequence
  miRNA Sequence
acugccccaggugcugcugg

SEQ ID NO: 1208 - RNA, 20 nt, Artificial Sequence
  miRNA Sequence
ccagcagcaccuggggcagu

SEQ ID NO: 1209 - RNA, 23 nt, Artificial Sequence
  miRNA Sequence
cgcauccccuagggcauuggugu

SEQ ID NO: 1210 - RNA, 23 nt, Artificial Sequence
  miRNA Sequence
acaccaaugcccuaggggaugcg

SEQ ID NO: 1211 - RNA, 23 nt, Artificial Sequence
  miRNA Sequence
ccuaguagguguccaguaagugu

SEQ ID NO: 1212 - RNA, 23 nt, Artificial Sequence
  miRNA Sequence
acacuuacuggacaccuacuagg

SEQ ID NO: 1213 - RNA, 20 nt, Artificial Sequence
  miRNA Sequence
ccucugggcccuuccuccag

SEQ ID NO: 1214 - RNA, 20 nt, Artificial Sequence
  miRNA Sequence
cuggaggaagggcccagagg

SEQ ID NO: 1215 - RNA, 22 nt, Artificial Sequence
  miRNA Sequence
cuggcccucucugcccuuccgu

SEQ ID NO: 1216 - RNA, 22 nt, Artificial Sequence
  miRNA Sequence
acggaagggcagagagggccag

SEQ ID NO: 1217 - RNA, 22 nt, Artificial Sequence
  miRNA Sequence
aacacaccugguuaaccucuuu

SEQ ID NO: 1218 - RNA, 22 nt, Artificial Sequence
  miRNA Sequence
aaagagguuaaccagguguguu

SEQ ID NO: 1219 - RNA, 23 nt, Artificial Sequence
  miRNA Sequence
gcaaagcacacggccugcagaga

SEQ ID NO: 1220 - RNA, 23 nt, Artificial Sequence
  miRNA Sequence
ucucugcaggccgugugcuuugc

SEQ ID NO: 1221 - RNA, 22 nt, Artificial Sequence
  miRNA Sequence
ucucugggccugugucuuaggc

SEQ ID NO: 1222 - RNA, 22 nt, Artificial Sequence
  miRNA Sequence
gccuaagacacaggcccagaga

SEQ ID NO: 1223 - RNA, 21 nt, Artificial Sequence
  miRNA Sequence
gccccugggccuauccuagaa

SEQ ID NO: 1224 - RNA, 21 nt, Artificial Sequence
  miRNA Sequence
uucuaggauaggcccaggggc

SEQ ID NO: 1225 - RNA, 22 nt, Artificial Sequence
  miRNA Sequence
cuagguauggucccagggaucc

SEQ ID NO: 1226 - RNA, 22 nt, Artificial Sequence
  miRNA Sequence
ggaucccugggaccauaccuag

SEQ ID NO: 1227 - RNA, 22 nt, Artificial Sequence
  miRNA Sequence
uuuuucauuauugcuccugacc

SEQ ID NO: 1228 - RNA, 22 nt, Artificial Sequence
  miRNA Sequence
ggucaggagcaauaaugaaaaa

SEQ ID NO: 1229 - RNA, 23 nt, Artificial Sequence
  miRNA Sequence
ucaagagcaauaacgaaaaaugu

SEQ ID NO: 1230 - RNA, 23 nt, Artificial Sequence
  miRNA Sequence
acauuuuucguuauugcucuuga

SEQ ID NO: 1231 - RNA, 22 nt, Artificial Sequence
  miRNA Sequence
cuccuauaugaugccuuucuuc

SEQ ID NO: 1232 - RNA, 22 nt, Artificial Sequence
  miRNA Sequence
gaagaaaggcaucauauaggag

SEQ ID NO: 1233 - RNA, 21 nt, Artificial Sequence
  miRNA Sequence
gaacggcuucauacaggaguu

SEQ ID NO: 1234 - RNA, 21 nt, Artificial Sequence
  miRNA Sequence
aacuccuguaugaagccguuc

SEQ ID NO: 1235 - RNA, 22 nt, Artificial Sequence
  miRNA Sequence
uccagcaucagugauuuuguug

SEQ ID NO: 1236 - RNA, 22 nt, Artificial Sequence
  miRNA Sequence
caacaaaaucacugaugcugga

SEQ ID NO: 1237 - RNA, 22 nt, Artificial Sequence
  miRNA Sequence
aacaauauccuggugcugagug

SEQ ID NO: 1238 - RNA, 22 nt, Artificial Sequence
  miRNA Sequence
cacucagcaccaggauauuguu

SEQ ID NO: 1239 - RNA, 23 nt, Artificial Sequence
  miRNA Sequence
ugagcgccucgacgacagagccg

SEQ ID NO: 1240 - RNA, 23 nt, Artificial Sequence
  miRNA Sequence
cggcucugucgucgaggcgcuca

SEQ ID NO: 1241 - RNA, 23 nt, Artificial Sequence
  miRNA Sequence
ucccuguccuccaggagcucacg

SEQ ID NO: 1242 - RNA, 23 nt, Artificial Sequence
  miRNA Sequence
cgugagcuccuggaggacaggga

SEQ ID NO: 1243 - RNA, 22 nt, Artificial Sequence
  miRNA Sequence
caauguuuccacagugcaucac

SEQ ID NO: 1244 - RNA, 22 nt, Artificial Sequence
  miRNA Sequence
gugaugcacuguggaaacauug

SEQ ID NO: 1245 - RNA, 21 nt, Artificial Sequence
  miRNA Sequence
gugcauuguaguugcauugca

SEQ ID NO: 1246 - RNA, 21 nt, Artificial Sequence
  miRNA Sequence
ugcaaugcaacuacaaugcac

SEQ ID NO: 1247 - RNA, 22 nt, Artificial Sequence
  miRNA Sequence
cagugccucggcagugcagccc

SEQ ID NO: 1248 - RNA, 22 nt, Artificial Sequence
  miRNA Sequence
gggcugcacugccgaggcacug

SEQ ID NO: 1249 - RNA, 20 nt, Artificial Sequence
  miRNA Sequence
gugcauugcuguugcauugc

SEQ ID NO: 1250 - RNA, 20 nt, Artificial Sequence
  miRNA Sequence
gcaaugcaacagcaaugcac

SEQ ID NO: 1251 - RNA, 22 nt, Artificial Sequence
  miRNA Sequence
uccgucucaguuacuuuauagc

SEQ ID NO: 1252 - RNA, 22 nt, Artificial Sequence
  miRNA Sequence
gcuauaaaguaacugagacgga

SEQ ID NO: 1253 - RNA, 22 nt, Artificial Sequence
  miRNA Sequence
uuauaaagcaaugagacugauu

SEQ ID NO: 1254 - RNA, 22 nt, Artificial Sequence
  miRNA Sequence
aaucagucucauugcuuuauaa

SEQ ID NO: 1255 - RNA, 23 nt, Artificial Sequence
  miRNA Sequence
ucucacacagaaaucgcacccgu

SEQ ID NO: 1256 - RNA, 23 nt, Artificial Sequence
  miRNA Sequence
acgggugcgauuucugugugaga

SEQ ID NO: 1257 - RNA, 21 nt, Artificial Sequence
  miRNA Sequence
aggggugcuaucugugauuga

SEQ ID NO: 1258 - RNA, 21 nt, Artificial Sequence
  miRNA Sequence
ucaaucacagauagcaccccu

SEQ ID NO: 1259 - RNA, 22 nt, Artificial Sequence
  miRNA Sequence
gcccugaacgaggggucuggag

SEQ ID NO: 1260 - RNA, 22 nt, Artificial Sequence
  miRNA Sequence
cuccagaccccucguucagggc

SEQ ID NO: 1261 - RNA, 22 nt, Artificial Sequence
  miRNA Sequence
gcugacuccuaguccagggcuc

SEQ ID NO: 1262 - RNA, 22 nt, Artificial Sequence
  miRNA Sequence
gagcccuggacuaggagucagc

SEQ ID NO: 1263 - RNA, 23 nt, Artificial Sequence
  miRNA Sequence
ugucugcccgcaugccugccucu

SEQ ID NO: 1264 - RNA, 23 nt, Artificial Sequence
  miRNA Sequence
agaggcaggcaugcgggcagaca

SEQ ID NO: 1265 - RNA, 22 nt, Artificial Sequence
  miRNA Sequence
caaucagcaaguauacugcccu

SEQ ID NO: 1266 - RNA, 22 nt, Artificial Sequence
  miRNA Sequence
agggcaguauacuugcugauug

SEQ ID NO: 1267 - RNA, 22 nt, Artificial Sequence
  miRNA Sequence
uggcagugucuuagcugguugu

SEQ ID NO: 1268 - RNA, 22 nt, Artificial Sequence
  miRNA Sequence
acaaccagcuaagacacugcca

SEQ ID NO: 1269 - RNA, 22 nt, Artificial Sequence
  miRNA Sequence
caaucacuaacuccacugccau

SEQ ID NO: 1270 - RNA, 22 nt, Artificial Sequence
  miRNA Sequence
auggcaguggaguuagugauug

SEQ ID NO: 1271 - RNA, 23 nt, Artificial Sequence
  miRNA Sequence
uaggcagugucauuagcugauug

SEQ ID NO: 1272 - RNA, 23 nt, Artificial Sequence
  miRNA Sequence
caaucagcuaaugacacugccua

SEQ ID NO: 1273 - RNA, 22 nt, Artificial Sequence
  miRNA Sequence
aaucacuaaccacacggccagg

SEQ ID NO: 1274 - RNA, 22 nt, Artificial Sequence
  miRNA Sequence
ccuggccgugugguuagugauu

SEQ ID NO: 1275 - RNA, 23 nt, Artificial Sequence
  miRNA Sequence
aggcaguguaguuagcugauugc

SEQ ID NO: 1276 - RNA, 23 nt, Artificial Sequence
  miRNA Sequence
gcaaucagcuaacuacacugccu

SEQ ID NO: 1277 - RNA, 24 nt, Artificial Sequence
  miRNA Sequence
aacaacaaaaucacuagucuucca

SEQ ID NO: 1278 - RNA, 24 nt, Artificial Sequence
  miRNA Sequence
uggaagacuagugauuuuguuguu

SEQ ID NO: 1279 - RNA, 22 nt, Artificial Sequence
  miRNA Sequence
agguagacugggauuuguuguu

SEQ ID NO: 1280 - RNA, 22 nt, Artificial Sequence
  miRNA Sequence
aacaacaaaucccagucuaccu

SEQ ID NO: 1281 - RNA, 23 nt, Artificial Sequence
  miRNA Sequence
uugaacuguuaagaaccacugga

SEQ ID NO: 1282 - RNA, 23 nt, Artificial Sequence
  miRNA Sequence
uccagugguucuuaacaguucaa

SEQ ID NO: 1283 - RNA, 22 nt, Artificial Sequence
  miRNA Sequence
uagugguccuaaacauuucaca

SEQ ID NO: 1284 - RNA, 22 nt, Artificial Sequence
  miRNA Sequence
ugugaaauguuuaggaccacua

SEQ ID NO: 1285 - RNA, 22 nt, Artificial Sequence
  miRNA Sequence
aaacaccauugucacacuccac

SEQ ID NO: 1286 - RNA, 22 nt, Artificial Sequence
  miRNA Sequence
guggagugugacaaugguguuu

SEQ ID NO: 1287 - RNA, 23 nt, Artificial Sequence
  miRNA Sequence
uuuagugugauaauggcguuuga

SEQ ID NO: 1288 - RNA, 23 nt, Artificial Sequence
  miRNA Sequence
ucaaacgccauuaucacacuaaa

SEQ ID NO: 1289 - RNA, 23 nt, Artificial Sequence
  miRNA Sequence
ccuccguguuaccuguccucuag

SEQ ID NO: 1290 - RNA, 23 nt, Artificial Sequence
  miRNA Sequence
cuagaggacagguaacacggagg

SEQ ID NO: 1291 - RNA, 23 nt, Artificial Sequence
  miRNA Sequence
ugaggauggauagcaaggaagcc

SEQ ID NO: 1292 - RNA, 23 nt, Artificial Sequence
  miRNA Sequence
ggcuuccuugcuauccauccuca

SEQ ID NO: 1293 - RNA, 21 nt, Artificial Sequence
  miRNA Sequence
uuagugaaggcuauuuuaauu

SEQ ID NO: 1294 - RNA, 21 nt, Artificial Sequence
  miRNA Sequence
aauuaaaauagccuucacuaa

SEQ ID NO: 1295 - RNA, 20 nt, Artificial Sequence
  miRNA Sequence
acuguaaacgcuuucugaug

SEQ ID NO: 1296 - RNA, 20 nt, Artificial Sequence
  miRNA Sequence
caucagaaagcguuuacagu

SEQ ID NO: 1297 - RNA, 22 nt, Artificial Sequence
  miRNA Sequence
gcaugugaugaagcaaaucagu

SEQ ID NO: 1298 - RNA, 22 nt, Artificial Sequence
  miRNA Sequence
acugauuugcuucaucacaugc

SEQ ID NO: 1299 - RNA, 24 nt, Artificial Sequence
  miRNA Sequence
caaagugaugaguaauacuggcug

SEQ ID NO: 1300 - RNA, 24 nt, Artificial Sequence
  miRNA Sequence
cagccaguauuacucaucacuuug

SEQ ID NO: 1301 - RNA, 23 nt, Artificial Sequence
  miRNA Sequence
ucccccaggugugauucugauuu

SEQ ID NO: 1302 - RNA, 23 nt, Artificial Sequence
  miRNA Sequence
aaaucagaaucacaccuggggga

SEQ ID NO: 1303 - RNA, 22 nt, Artificial Sequence
  miRNA Sequence
uuaucagaaucuccagggguac

SEQ ID NO: 1304 - RNA, 22 nt, Artificial Sequence
  miRNA Sequence
guaccccuggagauucugauaa

SEQ ID NO: 1305 - RNA, 20 nt, Artificial Sequence
  miRNA Sequence
gaaucggaaaggaggcgccg

SEQ ID NO: 1306 - RNA, 20 nt, Artificial Sequence
  miRNA Sequence
cggcgccuccuuuccgauuc

SEQ ID NO: 1307 - RNA, 21 nt, Artificial Sequence
  miRNA Sequence
uugugaagaaagaaauucuua

SEQ ID NO: 1308 - RNA, 21 nt, Artificial Sequence
  miRNA Sequence
uaagaauuucuuucuucacaa

SEQ ID NO: 1309 - RNA, 22 nt, Artificial Sequence
  miRNA Sequence
aggaggcaucuugagaaaugga

SEQ ID NO: 1310 - RNA, 22 nt, Artificial Sequence
  miRNA Sequence
uccauuucucaagaugccuccu

SEQ ID NO: 1311 - RNA, 24 nt, Artificial Sequence
  miRNA Sequence
acaaaaaaaaaagcccaacccuuc

SEQ ID NO: 1312 - RNA, 24 nt, Artificial Sequence
  miRNA Sequence
gaaggguugggcuuuuuuuuuugu

SEQ ID NO: 1313 - RNA, 22 nt, Artificial Sequence
  miRNA Sequence
uguuguacuuuuuuuuuuguuc

SEQ ID NO: 1314 - RNA, 22 nt, Artificial Sequence
  miRNA Sequence
gaacaaaaaaaaaaguacaaca

SEQ ID NO: 1315 - RNA, 23 nt, Artificial Sequence
  miRNA Sequence
uagccuucagaucuugguguuuu

SEQ ID NO: 1316 - RNA, 23 nt, Artificial Sequence
  miRNA Sequence
aaaacaccaagaucugaaggcua

SEQ ID NO: 1317 - RNA, 23 nt, Artificial Sequence
  miRNA Sequence
ccacuuggaucugaaggcugccc

SEQ ID NO: 1318 - RNA, 23 nt, Artificial Sequence
  miRNA Sequence
gggcagccuucagauccaagugg

SEQ ID NO: 1319 - RNA, 21 nt, Artificial Sequence
  miRNA Sequence
ucucucggcuccucgcggcuc

SEQ ID NO: 1320 - RNA, 21 nt, Artificial Sequence
  miRNA Sequence
gagccgcgaggagccgagaga

SEQ ID NO: 1321 - RNA, 23 nt, Artificial Sequence
  miRNA Sequence
cgagggcauuucaugaugcaggc

SEQ ID NO: 1322 - RNA, 23 nt, Artificial Sequence
  miRNA Sequence
gccugcaucaugaaaugcccucg

SEQ ID NO: 1323 - RNA, 22 nt, Artificial Sequence
  miRNA Sequence
augaagugcacucaugauaugu

SEQ ID NO: 1324 - RNA, 22 nt, Artificial Sequence
  miRNA Sequence
acauaucaugagugcacuucau

SEQ ID NO: 1325 - RNA, 22 nt, Artificial Sequence
  miRNA Sequence
aaagacauaguugcaagauggg

SEQ ID NO: 1326 - RNA, 22 nt, Artificial Sequence
  miRNA Sequence
cccaucuugcaacuaugucuuu

SEQ ID NO: 1327 - RNA, 22 nt, Artificial Sequence
  miRNA Sequence
ugucuacauuaaugaaaagagc

SEQ ID NO: 1328 - RNA, 22 nt, Artificial Sequence
  miRNA Sequence
gcucuuuucauuaauguagaca

SEQ ID NO: 1329 - RNA, 22 nt, Artificial Sequence
  miRNA Sequence
gggaccauccugccugcugugg

SEQ ID NO: 1330 - RNA, 22 nt, Artificial Sequence
  miRNA Sequence
ccacagcaggcaggaugguccc

SEQ ID NO: 1331 - RNA, 22 nt, Artificial Sequence
  miRNA Sequence
ucagcaggcaggcuggugcagc

SEQ ID NO: 1332 - RNA, 22 nt, Artificial Sequence
  miRNA Sequence
gcugcaccagccugccugcuga

SEQ ID NO: 1333 - RNA, 22 nt, Artificial Sequence
  miRNA Sequence
aacacaccuauucaaggauuca

SEQ ID NO: 1334 - RNA, 22 nt, Artificial Sequence
  miRNA Sequence
ugaauccuugaauagguguguu

SEQ ID NO: 1335 - RNA, 24 nt, Artificial Sequence
  miRNA Sequence
aauccuuggaaccuaggugugagu

SEQ ID NO: 1336 - RNA, 24 nt, Artificial Sequence
  miRNA Sequence
acucacaccuagguuccaaggauu

SEQ ID NO: 1337 - RNA, 22 nt, Artificial Sequence
  miRNA Sequence
ucacccugcaucccgcacccag

SEQ ID NO: 1338 - RNA, 22 nt, Artificial Sequence
  miRNA Sequence
cugggugcgggaugcaggguga

SEQ ID NO: 1339 - RNA, 20 nt, Artificial Sequence
  miRNA Sequence
cgcgggucggggucugcagg

SEQ ID NO: 1340 - RNA, 20 nt, Artificial Sequence
  miRNA Sequence
ccugcagaccccgacccgcg

SEQ ID NO: 1341 - RNA, 22 nt, Artificial Sequence
  miRNA Sequence
ucaccugaccucccaugccugu

SEQ ID NO: 1342 - RNA, 22 nt, Artificial Sequence
  miRNA Sequence
acaggcaugggaggucagguga

SEQ ID NO: 1343 - RNA, 22 nt, Artificial Sequence
  miRNA Sequence
caggcacgggagcucaggugag

SEQ ID NO: 1344 - RNA, 22 nt, Artificial Sequence
  miRNA Sequence
cucaccugagcucccgugccug

SEQ ID NO: 1345 - RNA, 21 nt, Artificial Sequence
  miRNA Sequence
ucaccugagcucccgugccug

SEQ ID NO: 1346 - RNA, 21 nt, Artificial Sequence
  miRNA Sequence
caggcacgggagcucagguga

SEQ ID NO: 1347 - RNA, 20 nt, Artificial Sequence
  miRNA Sequence
aggcaugggaggucagguga

SEQ ID NO: 1348 - RNA, 20 nt, Artificial Sequence
  miRNA Sequence
ucaccugaccucccaugccu

SEQ ID NO: 1349 - RNA, 22 nt, Artificial Sequence
  miRNA Sequence
aauugcacgguauccaucugua

SEQ ID NO: 1350 - RNA, 22 nt, Artificial Sequence
  miRNA Sequence
uacagauggauaccgugcaauu

SEQ ID NO: 1351 - RNA, 22 nt, Artificial Sequence
  miRNA Sequence
cggguggaucacgaugcaauuu

SEQ ID NO: 1352 - RNA, 22 nt, Artificial Sequence
  miRNA Sequence
aaauugcaucgugauccacccg

SEQ ID NO: 1353 - RNA, 22 nt, Artificial Sequence
  miRNA Sequence
aaaaugaaaugagcccagccca

SEQ ID NO: 1354 - RNA, 22 nt, Artificial Sequence
  miRNA Sequence
ugggcugggcucauuucauuuu

SEQ ID NO: 1355 - RNA, 21 nt, Artificial Sequence
  miRNA Sequence
agccgcggggaucgccgaggg

SEQ ID NO: 1356 - RNA, 21 nt, Artificial Sequence
  miRNA Sequence
cccucggcgauccccgcggcu

SEQ ID NO: 1357 - RNA, 19 nt, Artificial Sequence
  miRNA Sequence
agggaccugagugucuaag

SEQ ID NO: 1358 - RNA, 19 nt, Artificial Sequence
  miRNA Sequence
cuuagacacucaggucccu

SEQ ID NO: 1359 - RNA, 19 nt, Artificial Sequence
  miRNA Sequence
aggugugucuguagagucc

SEQ ID NO: 1360 - RNA, 19 nt, Artificial Sequence
  miRNA Sequence
ggacucuacagacacaccu

SEQ ID NO: 1361 - RNA, 24 nt, Artificial Sequence
  miRNA Sequence
cauagcccggucgcugguacauga

SEQ ID NO: 1362 - RNA, 24 nt, Artificial Sequence
  miRNA Sequence
ucauguaccagcgaccgggcuaug

SEQ ID NO: 1363 - RNA, 18 nt, Artificial Sequence
  miRNA Sequence
cggcuggaggugugagga

SEQ ID NO: 1364 - RNA, 18 nt, Artificial Sequence
  miRNA Sequence
uccucacaccuccagccg

SEQ ID NO: 1365 - RNA, 18 nt, Artificial Sequence
  miRNA Sequence
cuaagaaguugacugaag

SEQ ID NO: 1366 - RNA, 18 nt, Artificial Sequence
  miRNA Sequence
cuucagucaacuucuuag

SEQ ID NO: 1367 - RNA, 19 nt, Artificial Sequence
  miRNA Sequence
gacuggacaagcugaggaa

SEQ ID NO: 1368 - RNA, 19 nt, Artificial Sequence
  miRNA Sequence
uuccucagcuuguccaguc

SEQ ID NO: 1369 - RNA, 21 nt, Artificial Sequence
  miRNA Sequence
gcuugucgcugcgguguugcu

SEQ ID NO: 1370 - RNA, 21 nt, Artificial Sequence
  miRNA Sequence
agcaacaccgcagcgacaagc

SEQ ID NO: 1371 - RNA, 17 nt, Artificial Sequence
  miRNA Sequence
ggcgggugcgggggugg

SEQ ID NO: 1372 - RNA, 17 nt, Artificial Sequence
  miRNA Sequence
ccacccccgcacccgcc

SEQ ID NO: 1373 - RNA, 21 nt, Artificial Sequence
  miRNA Sequence
ugugucccauuauuggugauu

SEQ ID NO: 1374 - RNA, 21 nt, Artificial Sequence
  miRNA Sequence
aaucaccaauaaugggacaca

SEQ ID NO: 1375 - RNA, 22 nt, Artificial Sequence
  miRNA Sequence
uuuaagaaaacaccauggagau

SEQ ID NO: 1376 - RNA, 22 nt, Artificial Sequence
  miRNA Sequence
aucuccaugguguuuucuuaaa

SEQ ID NO: 1377 - RNA, 21 nt, Artificial Sequence
  miRNA Sequence
ugaguguugucuacgagggca

SEQ ID NO: 1378 - RNA, 21 nt, Artificial Sequence
  miRNA Sequence
ugcccucguagacaacacuca

SEQ ID NO: 1379 - RNA, 22 nt, Artificial Sequence
  miRNA Sequence
uaaugccccuaaaaauccuuau

SEQ ID NO: 1380 - RNA, 22 nt, Artificial Sequence
  miRNA Sequence
auaaggauuuuuaggggcauua

SEQ ID NO: 1381 - RNA, 23 nt, Artificial Sequence
  miRNA Sequence
agggacuuuugggggcagaugug

SEQ ID NO: 1382 - RNA, 23 nt, Artificial Sequence
  miRNA Sequence
cacaucugcccccaaaagucccu

SEQ ID NO: 1383 - RNA, 22 nt, Artificial Sequence
  miRNA Sequence
uaaugccccuaaaaauccuuau

SEQ ID NO: 1384 - RNA, 22 nt, Artificial Sequence
  miRNA Sequence
auaaggauuuuuaggggcauua

SEQ ID NO: 1385 - RNA, 22 nt, Artificial Sequence
  miRNA Sequence
agggacuuucaggggcagcugu

SEQ ID NO: 1386 - RNA, 22 nt, Artificial Sequence
  miRNA Sequence
acagcugccccugaaagucccu

SEQ ID NO: 1387 - RNA, 21 nt, Artificial Sequence
  miRNA Sequence
acugacaggagagcauuuuga

SEQ ID NO: 1388 - RNA, 21 nt, Artificial Sequence
  miRNA Sequence
ucaaaaugcucuccugucagu

SEQ ID NO: 1389 - RNA, 22 nt, Artificial Sequence
  miRNA Sequence
ugaccugggacucggacagcug

SEQ ID NO: 1390 - RNA, 22 nt, Artificial Sequence
  miRNA Sequence
cagcuguccgagucccagguca

SEQ ID NO: 1391 - RNA, 24 nt, Artificial Sequence
  miRNA Sequence
gaaaaugaugaguagugacugaug

SEQ ID NO: 1392 - RNA, 24 nt, Artificial Sequence
  miRNA Sequence
caucagucacuacucaucauuuuc

SEQ ID NO: 1393 - RNA, 23 nt, Artificial Sequence
  miRNA Sequence
ugagcaccacacaggccgggcgc

SEQ ID NO: 1394 - RNA, 23 nt, Artificial Sequence
  miRNA Sequence
gcgcccggccuguguggugcuca

SEQ ID NO: 1395 - RNA, 21 nt, Artificial Sequence
  miRNA Sequence
gcuggucugcguggugcucgg

SEQ ID NO: 1396 - RNA, 21 nt, Artificial Sequence
  miRNA Sequence
ccgagcaccacgcagaccagc

SEQ ID NO: 1397 - RNA, 22 nt, Artificial Sequence
  miRNA Sequence
ucucaggaguaaagacagaguu

SEQ ID NO: 1398 - RNA, 22 nt, Artificial Sequence
  miRNA Sequence
aacucugucuuuacuccugaga

SEQ ID NO: 1399 - RNA, 22 nt, Artificial Sequence
  miRNA Sequence
aacucugucuucacucaugagu

SEQ ID NO: 1400 - RNA, 22 nt, Artificial Sequence
  miRNA Sequence
acucaugagugaagacagaguu

SEQ ID NO: 1401 - RNA, 18 nt, Artificial Sequence
  miRNA Sequence
agcaggugcggggcggcg

SEQ ID NO: 1402 - RNA, 18 nt, Artificial Sequence
  miRNA Sequence
cgccgccccgcaccugcu

SEQ ID NO: 1403 - RNA, 21 nt, Artificial Sequence
  miRNA Sequence
cagugcaaguguagaugccga

SEQ ID NO: 1404 - RNA, 21 nt, Artificial Sequence
  miRNA Sequence
ucggcaucuacacuugcacug

SEQ ID NO: 1405 - RNA, 22 nt, Artificial Sequence
  miRNA Sequence
accuuccucuccaugggucuuu

SEQ ID NO: 1406 - RNA, 22 nt, Artificial Sequence
  miRNA Sequence
aaagacccauggagaggaaggu

SEQ ID NO: 1407 - RNA, 22 nt, Artificial Sequence
  miRNA Sequence
aaagacccauugaggagaaggu

SEQ ID NO: 1408 - RNA, 22 nt, Artificial Sequence
  miRNA Sequence
accuucuccucaaugggucuuu

SEQ ID NO: 1409 - RNA, 21 nt, Artificial Sequence
  miRNA Sequence
aauguagagauugaucaaaau

SEQ ID NO: 1410 - RNA, 21 nt, Artificial Sequence
  miRNA Sequence
auuuugaucaaucucuacauu

SEQ ID NO: 1411 - RNA, 23 nt, Artificial Sequence
  miRNA Sequence
acggaauauguauacggaauaua

SEQ ID NO: 1412 - RNA, 23 nt, Artificial Sequence
  miRNA Sequence
uauauuccguauacauauuccgu

SEQ ID NO: 1413 - RNA, 22 nt, Artificial Sequence
  miRNA Sequence
aauugcacuuuagcaaugguga

SEQ ID NO: 1414 - RNA, 22 nt, Artificial Sequence
  miRNA Sequence
ucaccauugcuaaagugcaauu

SEQ ID NO: 1415 - RNA, 22 nt, Artificial Sequence
  miRNA Sequence
acuguugcuaauaugcaacucu

SEQ ID NO: 1416 - RNA, 22 nt, Artificial Sequence
  miRNA Sequence
agaguugcauauuagcaacagu

SEQ ID NO: 1417 - RNA, 24 nt, Artificial Sequence
  miRNA Sequence
agagcucacagcuguccuucucua

SEQ ID NO: 1418 - RNA, 24 nt, Artificial Sequence
  miRNA Sequence
uagagaaggacagcugugagcucu

SEQ ID NO: 1419 - RNA, 22 nt, Artificial Sequence
  miRNA Sequence
aucaaauaaggacuagucugca

SEQ ID NO: 1420 - RNA, 22 nt, Artificial Sequence
  miRNA Sequence
ugcagacuaguccuuauuugau

SEQ ID NO: 1421 - RNA, 23 nt, Artificial Sequence
  miRNA Sequence
augagacucauguaaaacaucuu

SEQ ID NO: 1422 - RNA, 23 nt, Artificial Sequence
  miRNA Sequence
aagauguuuuacaugagucucau

SEQ ID NO: 1423 - RNA, 21 nt, Artificial Sequence
  miRNA Sequence
auggaauguauauacggaaua

SEQ ID NO: 1424 - RNA, 21 nt, Artificial Sequence
  miRNA Sequence
uauuccguauauacauuccau

SEQ ID NO: 1425 - RNA, 22 nt, Artificial Sequence
  miRNA Sequence
auuguagaaccuaagauuggcc

SEQ ID NO: 1426 - RNA, 22 nt, Artificial Sequence
  miRNA Sequence
ggccaaucuuagguucuacaau

SEQ ID NO: 1427 - RNA, 22 nt, Artificial Sequence
  miRNA Sequence
caucucuaaggaacucccccaa

SEQ ID NO: 1428 - RNA, 22 nt, Artificial Sequence
  miRNA Sequence
uugggggaguuccuuagagaug

SEQ ID NO: 1429 - RNA, 23 nt, Artificial Sequence
  miRNA Sequence
uauggggcuucuguagagauuuc

SEQ ID NO: 1430 - RNA, 23 nt, Artificial Sequence
  miRNA Sequence
gaaaucucuacagaagccccaua

SEQ ID NO: 1431 - RNA, 20 nt, Artificial Sequence
  miRNA Sequence
ccguguuucccccacgcuuu

SEQ ID NO: 1432 - RNA, 20 nt, Artificial Sequence
  miRNA Sequence
aaagcgugggggaaacacgg

SEQ ID NO: 1433 - RNA, 15 nt, Artificial Sequence
  miRNA Sequence
aggagauccuggguu

SEQ ID NO: 1434 - RNA, 15 nt, Artificial Sequence
  miRNA Sequence
aacccaggaucuccu

SEQ ID NO: 1435 - RNA, 22 nt, Artificial Sequence
  miRNA Sequence
cucgugggcucuggccacggcc

SEQ ID NO: 1436 - RNA, 22 nt, Artificial Sequence
  miRNA Sequence
ggccguggccagagcccacgag

SEQ ID NO: 1437 - RNA, 22 nt, Artificial Sequence
  miRNA Sequence
caguggccagagcccugcagug

SEQ ID NO: 1438 - RNA, 22 nt, Artificial Sequence
  miRNA Sequence
cacugcagggcucuggccacug

SEQ ID NO: 1439 - RNA, 22 nt, Artificial Sequence
  miRNA Sequence
cugcagaguuuguacggaccgg

SEQ ID NO: 1440 - RNA, 22 nt, Artificial Sequence
  miRNA Sequence
ccgguccguacaaacucugcag

SEQ ID NO: 1441 - RNA, 20 nt, Artificial Sequence
  miRNA Sequence
uccguacaaacucugcugug

SEQ ID NO: 1442 - RNA, 20 nt, Artificial Sequence
  miRNA Sequence
cacagcagaguuuguacgga

SEQ ID NO: 1443 - RNA, 22 nt, Artificial Sequence
  miRNA Sequence
cuuccccccaguaaucuucauc

SEQ ID NO: 1444 - RNA, 22 nt, Artificial Sequence
  miRNA Sequence
gaugaagauuacuggggggaag

SEQ ID NO: 1445 - RNA, 23 nt, Artificial Sequence
  miRNA Sequence
ugaggauauggcagggaagggga

SEQ ID NO: 1446 - RNA, 23 nt, Artificial Sequence
  miRNA Sequence
uccccuucccugccauauccuca

SEQ ID NO: 1447 - RNA, 23 nt, Artificial Sequence
  miRNA Sequence
uuuugcaugacccugggaguagg

SEQ ID NO: 1448 - RNA, 23 nt, Artificial Sequence
  miRNA Sequence
ccuacucccagggucaugcaaaa

SEQ ID NO: 1449 - RNA, 22 nt, Artificial Sequence
  miRNA Sequence
gacucacucacaggauugugca

SEQ ID NO: 1450 - RNA, 22 nt, Artificial Sequence
  miRNA Sequence
ugcacaauccugugagugaguc

SEQ ID NO: 1451 - RNA, 22 nt, Artificial Sequence
  miRNA Sequence
acacagugcuucauccacuacu

SEQ ID NO: 1452 - RNA, 22 nt, Artificial Sequence
  miRNA Sequence
aguaguggaugaagcacugugu

SEQ ID NO: 1453 - RNA, 22 nt, Artificial Sequence
  miRNA Sequence
uaguggaugaugcacucugugc

SEQ ID NO: 1454 - RNA, 22 nt, Artificial Sequence
  miRNA Sequence
gcacagagugcaucauccacua

SEQ ID NO: 1455 - RNA, 21 nt, Artificial Sequence
  miRNA Sequence
ugaugauacagguggagguag

SEQ ID NO: 1456 - RNA, 21 nt, Artificial Sequence
  miRNA Sequence
cuaccuccaccuguaucauca

SEQ ID NO: 1457 - RNA, 22 nt, Artificial Sequence
  miRNA Sequence
cuacuucuaccuguguuaucau

SEQ ID NO: 1458 - RNA, 22 nt, Artificial Sequence
  miRNA Sequence
augauaacacagguagaaguag

SEQ ID NO: 1459 - RNA, 22 nt, Artificial Sequence
  miRNA Sequence
ugcgacauuggaaguaguauca

SEQ ID NO: 1460 - RNA, 22 nt, Artificial Sequence
  miRNA Sequence
ugauacuacuuccaaugucgca

SEQ ID NO: 1461 - RNA, 21 nt, Artificial Sequence
  miRNA Sequence
uuagaccuaguacacguccuu

SEQ ID NO: 1462 - RNA, 21 nt, Artificial Sequence
  miRNA Sequence
aaggacguguacuaggucuaa

SEQ ID NO: 1463 - RNA, 22 nt, Artificial Sequence
  miRNA Sequence
uuuccuacccuaccugaagacu

SEQ ID NO: 1464 - RNA, 22 nt, Artificial Sequence
  miRNA Sequence
agucuucagguaggguaggaaa

SEQ ID NO: 1465 - RNA, 22 nt, Artificial Sequence
  miRNA Sequence
aucuguaagagaaaguaaauga

SEQ ID NO: 1466 - RNA, 22 nt, Artificial Sequence
  miRNA Sequence
ucauuuacuuucucuuacagau

SEQ ID NO: 1467 - RNA, 24 nt, Artificial Sequence
  miRNA Sequence
cccggacaggcguucgugcgacgu

SEQ ID NO: 1468 - RNA, 24 nt, Artificial Sequence
  miRNA Sequence
acgucgcacgaacgccuguccggg

SEQ ID NO: 1469 - RNA, 22 nt, Artificial Sequence
  miRNA Sequence
uauggaaagacuuugccacucu

SEQ ID NO: 1470 - RNA, 22 nt, Artificial Sequence
  miRNA Sequence
agaguggcaaagucuuuccaua

SEQ ID NO: 1471 - RNA, 21 nt, Artificial Sequence
  miRNA Sequence
aguggcaaagucuuuccauau

SEQ ID NO: 1472 - RNA, 21 nt, Artificial Sequence
  miRNA Sequence
auauggaaagacuuugccacu

SEQ ID NO: 1473 - RNA, 22 nt, Artificial Sequence
  miRNA Sequence
cugggaggugugauaucguggu

SEQ ID NO: 1474 - RNA, 22 nt, Artificial Sequence
  miRNA Sequence
accacgauaucacaccucccag

SEQ ID NO: 1475 - RNA, 22 nt, Artificial Sequence
  miRNA Sequence
ugugauaucaugguuccuggga

SEQ ID NO: 1476 - RNA, 22 nt, Artificial Sequence
  miRNA Sequence
ucccaggaaccaugauaucaca

SEQ ID NO: 1477 - RNA, 22 nt, Artificial Sequence
  miRNA Sequence
cugggaggugugauauuguggu

SEQ ID NO: 1478 - RNA, 22 nt, Artificial Sequence
  miRNA Sequence
accacaauaucacaccucccag

SEQ ID NO: 1479 - RNA, 22 nt, Artificial Sequence
  miRNA Sequence
ugugauaucaugguuccuggga

SEQ ID NO: 1480 - RNA, 22 nt, Artificial Sequence
  miRNA Sequence
ucccaggaaccaugauaucaca

SEQ ID NO: 1481 - RNA, 22 nt, Artificial Sequence
  miRNA Sequence
cugggaggugugauauuguggu

SEQ ID NO: 1482 - RNA, 22 nt, Artificial Sequence
  miRNA Sequence
accacaauaucacaccucccag

SEQ ID NO: 1483 - RNA, 22 nt, Artificial Sequence
  miRNA Sequence
gggaggugugaucucacacucg

SEQ ID NO: 1484 - RNA, 22 nt, Artificial Sequence
  miRNA Sequence
cgagugugagaucacaccuccc

SEQ ID NO: 1485 - RNA, 22 nt, Artificial Sequence
  miRNA Sequence
ugugauaucaugguuccuggga

SEQ ID NO: 1486 - RNA, 22 nt, Artificial Sequence
  miRNA Sequence
ucccaggaaccaugauaucaca

SEQ ID NO: 1487 - RNA, 22 nt, Artificial Sequence
  miRNA Sequence
ugugauaucgugcuuccuggga

SEQ ID NO: 1488 - RNA, 22 nt, Artificial Sequence
  miRNA Sequence
ucccaggaagcacgauaucaca

SEQ ID NO: 1489 - RNA, 21 nt, Artificial Sequence
  miRNA Sequence
aauaauacaugguugaucuuu

SEQ ID NO: 1490 - RNA, 21 nt, Artificial Sequence
  miRNA Sequence
aaagaucaaccauguauuauu

SEQ ID NO: 1491 - RNA, 22 nt, Artificial Sequence
  miRNA Sequence
agaucgaccguguuauauucgc

SEQ ID NO: 1492 - RNA, 22 nt, Artificial Sequence
  miRNA Sequence
gcgaauauaacacggucgaucu

SEQ ID NO: 1493 - RNA, 23 nt, Artificial Sequence
  miRNA Sequence
accuggacccagcguagacaaag

SEQ ID NO: 1494 - RNA, 23 nt, Artificial Sequence
  miRNA Sequence
cuuugucuacgcuggguccaggu

SEQ ID NO: 1495 - RNA, 22 nt, Artificial Sequence
  miRNA Sequence
accaagucugcgucauccucuc

SEQ ID NO: 1496 - RNA, 22 nt, Artificial Sequence
  miRNA Sequence
gagaggaugacgcagacuuggu

SEQ ID NO: 1497 - RNA, 23 nt, Artificial Sequence
  miRNA Sequence
aguggaugauggagacucgguac

SEQ ID NO: 1498 - RNA, 23 nt, Artificial Sequence
  miRNA Sequence
guaccgagucuccaucauccacu

SEQ ID NO: 1499 - RNA, 24 nt, Artificial Sequence
  miRNA Sequence
guuccacacugacacugcagaagu

SEQ ID NO: 1500 - RNA, 24 nt, Artificial Sequence
  miRNA Sequence
acuucugcagugucaguguggaac

SEQ ID NO: 1501 - RNA, 24 nt, Artificial Sequence
  miRNA Sequence
ccugcuggucaggaguggauacug

SEQ ID NO: 1502 - RNA, 24 nt, Artificial Sequence
  miRNA Sequence
caguauccacuccugaccagcagg

SEQ ID NO: 1503 - RNA, 22 nt, Artificial Sequence
  miRNA Sequence
gccugcugggguggaaccuggu

SEQ ID NO: 1504 - RNA, 22 nt, Artificial Sequence
  miRNA Sequence
accagguuccaccccagcaggc

SEQ ID NO: 1505 - RNA, 20 nt, Artificial Sequence
  miRNA Sequence
gguauccguuuggggauggu

SEQ ID NO: 1506 - RNA, 20 nt, Artificial Sequence
  miRNA Sequence
accauccccaaacggauacc

SEQ ID NO: 1507 - RNA, 22 nt, Artificial Sequence
  miRNA Sequence
gaaggcagcagugcuccccugu

SEQ ID NO: 1508 - RNA, 22 nt, Artificial Sequence
  miRNA Sequence
acaggggagcacugcugccuuc

SEQ ID NO: 1509 - RNA, 23 nt, Artificial Sequence
  miRNA Sequence
aagugccgccaucuuuugagugu

SEQ ID NO: 1510 - RNA, 23 nt, Artificial Sequence
  miRNA Sequence
acacucaaaagauggcggcacuu

SEQ ID NO: 1511 - RNA, 20 nt, Artificial Sequence
  miRNA Sequence
acucaaacugugggggcacu

SEQ ID NO: 1512 - RNA, 20 nt, Artificial Sequence
  miRNA Sequence
agugcccccacaguuugagu

SEQ ID NO: 1513 - RNA, 23 nt, Artificial Sequence
  miRNA Sequence
aagugcccccacaguuugagugc

SEQ ID NO: 1514 - RNA, 23 nt, Artificial Sequence
  miRNA Sequence
gcacucaaacugugggggcacuu

SEQ ID NO: 1515 - RNA, 22 nt, Artificial Sequence
  miRNA Sequence
acucaaaagauggcggcacuuu

SEQ ID NO: 1516 - RNA, 22 nt, Artificial Sequence
  miRNA Sequence
aaagugccgccaucuuuugagu

SEQ ID NO: 1517 - RNA, 23 nt, Artificial Sequence
  miRNA Sequence
aaagugcugcgacauuugagcgu

SEQ ID NO: 1518 - RNA, 23 nt, Artificial Sequence
  miRNA Sequence
acgcucaaaugucgcagcacuuu

SEQ ID NO: 1519 - RNA, 23 nt, Artificial Sequence
  miRNA Sequence
gaagugcuucgauuuuggggugu

SEQ ID NO: 1520 - RNA, 23 nt, Artificial Sequence
  miRNA Sequence
acaccccaaaaucgaagcacuuc

SEQ ID NO: 1521 - RNA, 22 nt, Artificial Sequence
  miRNA Sequence
acucaaaaugggggcgcuuucc

SEQ ID NO: 1522 - RNA, 22 nt, Artificial Sequence
  miRNA Sequence
ggaaagcgcccccauuuugagu

SEQ ID NO: 1523 - RNA, 22 nt, Artificial Sequence
  miRNA Sequence
cuuaucagauuguauuguaauu

SEQ ID NO: 1524 - RNA, 22 nt, Artificial Sequence
  miRNA Sequence
aauuacaauacaaucugauaag

SEQ ID NO: 1525 - RNA, 22 nt, Artificial Sequence
  miRNA Sequence
uuauaauacaaccugauaagug

SEQ ID NO: 1526 - RNA, 22 nt, Artificial Sequence
  miRNA Sequence
cacuuaucagguuguauuauaa

SEQ ID NO: 1527 - RNA, 22 nt, Artificial Sequence
  miRNA Sequence
cuuagcagguuguauuaucauu

SEQ ID NO: 1528 - RNA, 22 nt, Artificial Sequence
  miRNA Sequence
aaugauaauacaaccugcuaag

SEQ ID NO: 1529 - RNA, 22 nt, Artificial Sequence
  miRNA Sequence
auauaauacaaccugcuaagug

SEQ ID NO: 1530 - RNA, 22 nt, Artificial Sequence
  miRNA Sequence
cacuuagcagguuguauuauau

SEQ ID NO: 1531 - RNA, 22 nt, Artificial Sequence
  miRNA Sequence
cacuuagcagguuguauuauau

SEQ ID NO: 1532 - RNA, 22 nt, Artificial Sequence
  miRNA Sequence
auauaauacaaccugcuaagug

SEQ ID NO: 1533 - RNA, 22 nt, Artificial Sequence
  miRNA Sequence
auaauacaaccugcuaagugcu

SEQ ID NO: 1534 - RNA, 22 nt, Artificial Sequence
  miRNA Sequence
agcacuuagcagguuguauuau

SEQ ID NO: 1535 - RNA, 22 nt, Artificial Sequence
  miRNA Sequence
uuuguucguucggcucgcguga

SEQ ID NO: 1536 - RNA, 22 nt, Artificial Sequence
  miRNA Sequence
ucacgcgagccgaacgaacaaa

SEQ ID NO: 1537 - RNA, 21 nt, Artificial Sequence
  miRNA Sequence
aucauagaggaaaauccacgu

SEQ ID NO: 1538 - RNA, 21 nt, Artificial Sequence
  miRNA Sequence
acguggauuuuccucuaugau

SEQ ID NO: 1539 - RNA, 22 nt, Artificial Sequence
  miRNA Sequence
guagauucuccuucuaugagua

SEQ ID NO: 1540 - RNA, 22 nt, Artificial Sequence
  miRNA Sequence
uacucauagaaggagaaucuac

SEQ ID NO: 1541 - RNA, 22 nt, Artificial Sequence
  miRNA Sequence
aucauagaggaaaauccauguu

SEQ ID NO: 1542 - RNA, 22 nt, Artificial Sequence
  miRNA Sequence
aacauggauuuuccucuaugau

SEQ ID NO: 1543 - RNA, 21 nt, Artificial Sequence
  miRNA Sequence
aacauagaggaaauuccacgu

SEQ ID NO: 1544 - RNA, 21 nt, Artificial Sequence
  miRNA Sequence
acguggaauuuccucuauguu

SEQ ID NO: 1545 - RNA, 22 nt, Artificial Sequence
  miRNA Sequence
aucacacaaaggcaacuuuugu

SEQ ID NO: 1546 - RNA, 22 nt, Artificial Sequence
  miRNA Sequence
acaaaaguugccuuugugugau

SEQ ID NO: 1547 - RNA, 22 nt, Artificial Sequence
  miRNA Sequence
agagguugcccuuggugaauuc

SEQ ID NO: 1548 - RNA, 22 nt, Artificial Sequence
  miRNA Sequence
gaauucaccaagggcaaccucu

SEQ ID NO: 1549 - RNA, 21 nt, Artificial Sequence
  miRNA Sequence
acuggacuuggagucagaagg

SEQ ID NO: 1550 - RNA, 21 nt, Artificial Sequence
  miRNA Sequence
ccuucugacuccaaguccagu

SEQ ID NO: 1551 - RNA, 22 nt, Artificial Sequence
  miRNA Sequence
cuccugacuccagguccugugu

SEQ ID NO: 1552 - RNA, 22 nt, Artificial Sequence
  miRNA Sequence
acacaggaccuggagucaggag

SEQ ID NO: 1553 - RNA, 19 nt, Artificial Sequence
  miRNA Sequence
acuggacuuggaggcagaa

SEQ ID NO: 1554 - RNA, 19 nt, Artificial Sequence
  miRNA Sequence
uucugccuccaaguccagu

SEQ ID NO: 1555 - RNA, 25 nt, Artificial Sequence
  miRNA Sequence
acuggacuuggagucagaagagugg

SEQ ID NO: 1556 - RNA, 25 nt, Artificial Sequence
  miRNA Sequence
ccacucuucugacuccaaguccagu

SEQ ID NO: 1557 - RNA, 20 nt, Artificial Sequence
  miRNA Sequence
acuggacuuggagucagaaa

SEQ ID NO: 1558 - RNA, 20 nt, Artificial Sequence
  miRNA Sequence
uuucugacuccaaguccagu

SEQ ID NO: 1559 - RNA, 19 nt, Artificial Sequence
  miRNA Sequence
acuggacuuggagucagga

SEQ ID NO: 1560 - RNA, 19 nt, Artificial Sequence
  miRNA Sequence
uccugacuccaaguccagu

SEQ ID NO: 1561 - RNA, 20 nt, Artificial Sequence
  miRNA Sequence
acuggacuuggagccagaag

SEQ ID NO: 1562 - RNA, 20 nt, Artificial Sequence
  miRNA Sequence
cuucuggcuccaaguccagu

SEQ ID NO: 1563 - RNA, 20 nt, Artificial Sequence
  miRNA Sequence
acugggcuuggagucagaag

SEQ ID NO: 1564 - RNA, 20 nt, Artificial Sequence
  miRNA Sequence
cuucugacuccaagcccagu

SEQ ID NO: 1565 - RNA, 21 nt, Artificial Sequence
  miRNA Sequence
acuggacuuggugucagaugg

SEQ ID NO: 1566 - RNA, 21 nt, Artificial Sequence
  miRNA Sequence
ccaucugacaccaaguccagu

SEQ ID NO: 1567 - RNA, 21 nt, Artificial Sequence
  miRNA Sequence
acuggacuaggagucagaagg

SEQ ID NO: 1568 - RNA, 21 nt, Artificial Sequence
  miRNA Sequence
ccuucugacuccuaguccagu

SEQ ID NO: 1569 - RNA, 22 nt, Artificial Sequence
  miRNA Sequence
uauguaacaugguccacuaacu

SEQ ID NO: 1570 - RNA, 22 nt, Artificial Sequence
  miRNA Sequence
aguuaguggaccauguuacaua

SEQ ID NO: 1571 - RNA, 21 nt, Artificial Sequence
  miRNA Sequence
ugguagacuauggaacguagg

SEQ ID NO: 1572 - RNA, 21 nt, Artificial Sequence
  miRNA Sequence
ccuacguuccauagucuacca

SEQ ID NO: 1573 - RNA, 22 nt, Artificial Sequence
  miRNA Sequence
uauguaauaugguccacaucuu

SEQ ID NO: 1574 - RNA, 22 nt, Artificial Sequence
  miRNA Sequence
aagauguggaccauauuacaua

SEQ ID NO: 1575 - RNA, 22 nt, Artificial Sequence
  miRNA Sequence
ugguugaccauagaacaugcgc

SEQ ID NO: 1576 - RNA, 22 nt, Artificial Sequence
  miRNA Sequence
gcgcauguucuauggucaacca

SEQ ID NO: 1577 - RNA, 22 nt, Artificial Sequence
  miRNA Sequence
uauacaagggcaagcucucugu

SEQ ID NO: 1578 - RNA, 22 nt, Artificial Sequence
  miRNA Sequence
acagagagcuugcccuuguaua

SEQ ID NO: 1579 - RNA, 21 nt, Artificial Sequence
  miRNA Sequence
aaucauucacggacaacacuu

SEQ ID NO: 1580 - RNA, 21 nt, Artificial Sequence
  miRNA Sequence
aaguguuguccgugaaugauu

SEQ ID NO: 1581 - RNA, 22 nt, Artificial Sequence
  miRNA Sequence
gaaguuguucgugguggauucg

SEQ ID NO: 1582 - RNA, 22 nt, Artificial Sequence
  miRNA Sequence
cgaauccaccacgaacaacuuc

SEQ ID NO: 1583 - RNA, 22 nt, Artificial Sequence
  miRNA Sequence
agaucagaaggugauuguggcu

SEQ ID NO: 1584 - RNA, 22 nt, Artificial Sequence
  miRNA Sequence
agccacaaucaccuucugaucu

SEQ ID NO: 1585 - RNA, 20 nt, Artificial Sequence
  miRNA Sequence
auuccuagaaauuguucaua

SEQ ID NO: 1586 - RNA, 20 nt, Artificial Sequence
  miRNA Sequence
uaugaacaauuucuaggaau

SEQ ID NO: 1587 - RNA, 22 nt, Artificial Sequence
  miRNA Sequence
aggugcuccaggcuggcucaca

SEQ ID NO: 1588 - RNA, 22 nt, Artificial Sequence
  miRNA Sequence
ugugagccagccuggagcaccu

SEQ ID NO: 1589 - RNA, 22 nt, Artificial Sequence
  miRNA Sequence
gagcaauguagguagacuguuu

SEQ ID NO: 1590 - RNA, 22 nt, Artificial Sequence
  miRNA Sequence
aaacagucuaccuacauugcuc

SEQ ID NO: 1591 - RNA, 22 nt, Artificial Sequence
  miRNA Sequence
uguccucuagggccugcagucu

SEQ ID NO: 1592 - RNA, 22 nt, Artificial Sequence
  miRNA Sequence
agacugcaggcccuagaggaca

SEQ ID NO: 1593 - RNA, 20 nt, Artificial Sequence
  miRNA Sequence
aaaggcauaaaaccaagaca

SEQ ID NO: 1594 - RNA, 20 nt, Artificial Sequence
  miRNA Sequence
ugucuugguuuuaugccuuu

SEQ ID NO: 1595 - RNA, 22 nt, Artificial Sequence
  miRNA Sequence
uguguggauccuggaggaggca

SEQ ID NO: 1596 - RNA, 22 nt, Artificial Sequence
  miRNA Sequence
ugccuccuccaggauccacaca

SEQ ID NO: 1597 - RNA, 21 nt, Artificial Sequence
  miRNA Sequence
uaacgcauaauauggacaugu

SEQ ID NO: 1598 - RNA, 21 nt, Artificial Sequence
  miRNA Sequence
acauguccauauuaugcguua

SEQ ID NO: 1599 - RNA, 22 nt, Artificial Sequence
  miRNA Sequence
agacaucaagaucagucccaaa

SEQ ID NO: 1600 - RNA, 22 nt, Artificial Sequence
  miRNA Sequence
uuugggacugaucuugaugucu

SEQ ID NO: 1601 - RNA, 22 nt, Artificial Sequence
  miRNA Sequence
uuugggacugaucuugaugucu

SEQ ID NO: 1602 - RNA, 22 nt, Artificial Sequence
  miRNA Sequence
agacaucaagaucagucccaaa

SEQ ID NO: 1603 - RNA, 22 nt, Artificial Sequence
  miRNA Sequence
aaggaaccagaaaaugagaagu

SEQ ID NO: 1604 - RNA, 22 nt, Artificial Sequence
  miRNA Sequence
acuucucauuuucugguuccuu

SEQ ID NO: 1605 - RNA, 22 nt, Artificial Sequence
  miRNA Sequence
uugaggaaaagauggucuuauu

SEQ ID NO: 1606 - RNA, 22 nt, Artificial Sequence
  miRNA Sequence
aauaagaccaucuuuuccucaa

SEQ ID NO: 1607 - RNA, 26 nt, Artificial Sequence
  miRNA Sequence
aagaggaagaaauggcugguucucag

SEQ ID NO: 1608 - RNA, 26 nt, Artificial Sequence
  miRNA Sequence
cugagaaccagccauuucuuccucuu

SEQ ID NO: 1609 - RNA, 20 nt, Artificial Sequence
  miRNA Sequence
gcucggacugagcagguggg

SEQ ID NO: 1610 - RNA, 20 nt, Artificial Sequence
  miRNA Sequence
cccaccugcucaguccgagc

SEQ ID NO: 1611 - RNA, 21 nt, Artificial Sequence
  miRNA Sequence
acagggccgcagauggagacu

SEQ ID NO: 1612 - RNA, 21 nt, Artificial Sequence
  miRNA Sequence
agucuccaucugcggcccugu

SEQ ID NO: 1613 - RNA, 21 nt, Artificial Sequence
  miRNA Sequence
gcagagaacaaaggacucagu

SEQ ID NO: 1614 - RNA, 21 nt, Artificial Sequence
  miRNA Sequence
acugaguccuuuguucucugc

SEQ ID NO: 1615 - RNA, 22 nt, Artificial Sequence
  miRNA Sequence
acugauuaucuuaacucucuga

SEQ ID NO: 1616 - RNA, 22 nt, Artificial Sequence
  miRNA Sequence
ucagagaguuaagauaaucagu

SEQ ID NO: 1617 - RNA, 23 nt, Artificial Sequence
  miRNA Sequence
ucucugaguaccauaugccuugu

SEQ ID NO: 1618 - RNA, 23 nt, Artificial Sequence
  miRNA Sequence
acaaggcauaugguacucagaga

SEQ ID NO: 1619 - RNA, 22 nt, Artificial Sequence
  miRNA Sequence
ucuggccuugacuugacucuuu

SEQ ID NO: 1620 - RNA, 22 nt, Artificial Sequence
  miRNA Sequence
aaagagucaagucaaggccaga

SEQ ID NO: 1621 - RNA, 23 nt, Artificial Sequence
  miRNA Sequence
ucaaggccagaggucccacagca

SEQ ID NO: 1622 - RNA, 23 nt, Artificial Sequence
  miRNA Sequence
ugcugugggaccucuggccuuga

SEQ ID NO: 1623 - RNA, 22 nt, Artificial Sequence
  miRNA Sequence
aacuaguaauguuggauuaggg

SEQ ID NO: 1624 - RNA, 22 nt, Artificial Sequence
  miRNA Sequence
cccuaauccaacauuacuaguu

SEQ ID NO: 1625 - RNA, 22 nt, Artificial Sequence
  miRNA Sequence
auauguauaugugacugcuacu

SEQ ID NO: 1626 - RNA, 22 nt, Artificial Sequence
  miRNA Sequence
aguagcagucacauauacauau

SEQ ID NO: 1627 - RNA, 21 nt, Artificial Sequence
  miRNA Sequence
acuccaguuuuaguucucuug

SEQ ID NO: 1628 - RNA, 21 nt, Artificial Sequence
  miRNA Sequence
caagagaacuaaaacuggagu

SEQ ID NO: 1629 - RNA, 22 nt, Artificial Sequence
  miRNA Sequence
aagagaacugaaaguggagccu

SEQ ID NO: 1630 - RNA, 22 nt, Artificial Sequence
  miRNA Sequence
aggcuccacuuucaguucucuu

SEQ ID NO: 1631 - RNA, 21 nt, Artificial Sequence
  miRNA Sequence
uggccaaaaagcaggcagaga

SEQ ID NO: 1632 - RNA, 21 nt, Artificial Sequence
  miRNA Sequence
ucucugccugcuuuuuggcca

SEQ ID NO: 1633 - RNA, 22 nt, Artificial Sequence
  miRNA Sequence
cagguagauauuugauaggcau

SEQ ID NO: 1634 - RNA, 22 nt, Artificial Sequence
  miRNA Sequence
augccuaucaaauaucuaccug

SEQ ID NO: 1635 - RNA, 22 nt, Artificial Sequence
  miRNA Sequence
ggaggaaccuuggagcuucggc

SEQ ID NO: 1636 - RNA, 22 nt, Artificial Sequence
  miRNA Sequence
gccgaagcuccaagguuccucc

SEQ ID NO: 1637 - RNA, 23 nt, Artificial Sequence
  miRNA Sequence
gaggcugaugugaguagaccacu

SEQ ID NO: 1638 - RNA, 23 nt, Artificial Sequence
  miRNA Sequence
aguggucuacucacaucagccuc

SEQ ID NO: 1639 - RNA, 22 nt, Artificial Sequence
  miRNA Sequence
ucagguguggaaacugaggcag

SEQ ID NO: 1640 - RNA, 22 nt, Artificial Sequence
  miRNA Sequence
cugccucaguuuccacaccuga

SEQ ID NO: 1641 - RNA, 22 nt, Artificial Sequence
  miRNA Sequence
uguagauacgagcaccagccac

SEQ ID NO: 1642 - RNA, 22 nt, Artificial Sequence
  miRNA Sequence
guggcuggugcucguaucuaca

SEQ ID NO: 1643 - RNA, 22 nt, Artificial Sequence
  miRNA Sequence
uaagggguguauggcagaugca

SEQ ID NO: 1644 - RNA, 22 nt, Artificial Sequence
  miRNA Sequence
ugcaucugccauacaccccuua

SEQ ID NO: 1645 - RNA, 23 nt, Artificial Sequence
  miRNA Sequence
acaggcggcuguagcaauggggg

SEQ ID NO: 1646 - RNA, 23 nt, Artificial Sequence
  miRNA Sequence
cccccauugcuacagccgccugu

SEQ ID NO: 1647 - RNA, 22 nt, Artificial Sequence
  miRNA Sequence
aauucccuuguagauaacccgg

SEQ ID NO: 1648 - RNA, 22 nt, Artificial Sequence
  miRNA Sequence
ccggguuaucuacaagggaauu

SEQ ID NO: 1649 - RNA, 22 nt, Artificial Sequence
  miRNA Sequence
uacgcgcagaccacaggauguc

SEQ ID NO: 1650 - RNA, 22 nt, Artificial Sequence
  miRNA Sequence
gacauccuguggucugcgcgua

SEQ ID NO: 1651 - RNA, 22 nt, Artificial Sequence
  miRNA Sequence
cagcccggaucccagcccacuu

SEQ ID NO: 1652 - RNA, 22 nt, Artificial Sequence
  miRNA Sequence
aagugggcugggauccgggcug

SEQ ID NO: 1653 - RNA, 20 nt, Artificial Sequence
  miRNA Sequence
guggguuggggcgggcucug

SEQ ID NO: 1654 - RNA, 20 nt, Artificial Sequence
  miRNA Sequence
cagagcccgccccaacccac

SEQ ID NO: 1655 - RNA, 22 nt, Artificial Sequence
  miRNA Sequence
uuacacacaacugaggaucaua

SEQ ID NO: 1656 - RNA, 22 nt, Artificial Sequence
  miRNA Sequence
uaugauccucaguuguguguaa

SEQ ID NO: 1657 - RNA, 21 nt, Artificial Sequence
  miRNA Sequence
uuucagauaacaguauuacau

SEQ ID NO: 1658 - RNA, 21 nt, Artificial Sequence
  miRNA Sequence
auguaauacuguuaucugaaa

SEQ ID NO: 1659 - RNA, 22 nt, Artificial Sequence
  miRNA Sequence
aagcaauacuguuaccugaaau

SEQ ID NO: 1660 - RNA, 22 nt, Artificial Sequence
  miRNA Sequence
auuucagguaacaguauugcuu

SEQ ID NO: 1661 - RNA, 23 nt, Artificial Sequence
  miRNA Sequence
uagcccccaggcuucacuuggcg

SEQ ID NO: 1662 - RNA, 23 nt, Artificial Sequence
  miRNA Sequence
cgccaagugaagccugggggcua

SEQ ID NO: 1663 - RNA, 23 nt, Artificial Sequence
  miRNA Sequence
uucgggcuggccugcugcuccgg

SEQ ID NO: 1664 - RNA, 23 nt, Artificial Sequence
  miRNA Sequence
ccggagcagcaggccagcccgaa

SEQ ID NO: 1665 - RNA, 21 nt, Artificial Sequence
  miRNA Sequence
ugugcagcaggccaaccgaga

SEQ ID NO: 1666 - RNA, 21 nt, Artificial Sequence
  miRNA Sequence
ucucgguuggccugcugcaca

SEQ ID NO: 1667 - RNA, 23 nt, Artificial Sequence
  miRNA Sequence
agggcauaggagaggguugauau

SEQ ID NO: 1668 - RNA, 23 nt, Artificial Sequence
  miRNA Sequence
auaucaacccucuccuaugcccu

SEQ ID NO: 1669 - RNA, 20 nt, Artificial Sequence
  miRNA Sequence
ggcggcggcggaggcggggg

SEQ ID NO: 1670 - DNA, 20 bp, Artificial Sequence
  miRNA Sequence
cccccgcctccgccgccgcc

SEQ ID NO: 1671 - RNA, 22 nt, Artificial Sequence
  miRNA Sequence
cugccagccccguuccagggca

SEQ ID NO: 1672 - RNA, 22 nt, Artificial Sequence
  miRNA Sequence
ugcccuggaacggggcuggcag

SEQ ID NO: 1673 - RNA, 23 nt, Artificial Sequence
  miRNA Sequence
acaaaguacagcauuagccuuag

SEQ ID NO: 1674 - RNA, 23 nt, Artificial Sequence
  miRNA Sequence
cuaaggcuaaugcuguacuuugu

SEQ ID NO: 1675 - RNA, 23 nt, Artificial Sequence
  miRNA Sequence
aaaggucauuguaagguuaaugc

SEQ ID NO: 1676 - RNA, 23 nt, Artificial Sequence
  miRNA Sequence
gcauuaaccuuacaaugaccuuu

SEQ ID NO: 1677 - RNA, 22 nt, Artificial Sequence
  miRNA Sequence
ugaggcuaaugcacuacuucac

SEQ ID NO: 1678 - RNA, 22 nt, Artificial Sequence
  miRNA Sequence
gugaaguagugcauuagccuca

SEQ ID NO: 1679 - RNA, 24 nt, Artificial Sequence
  miRNA Sequence
uauagagagcaggaagauuaaugu

SEQ ID NO: 1680 - RNA, 24 nt, Artificial Sequence
  miRNA Sequence
acauuaaucuuccugcucucuaua

SEQ ID NO: 1681 - RNA, 23 nt, Artificial Sequence
  miRNA Sequence
gugcuucaucguaauuaaccuua

SEQ ID NO: 1682 - RNA, 23 nt, Artificial Sequence
  miRNA Sequence
uaagguuaauuacgaugaagcac

SEQ ID NO: 1683 - RNA, 24 nt, Artificial Sequence
  miRNA Sequence
guggaaagcaugcauccagggugu

SEQ ID NO: 1684 - RNA, 24 nt, Artificial Sequence
  miRNA Sequence
acacccuggaugcaugcuuuccac

SEQ ID NO: 1685 - RNA, 22 nt, Artificial Sequence
  miRNA Sequence
gaauguugcucggugaaccccu

SEQ ID NO: 1686 - RNA, 22 nt, Artificial Sequence
  miRNA Sequence
agggguucaccgagcaacauuc

SEQ ID NO: 1687 - RNA, 23 nt, Artificial Sequence
  miRNA Sequence
agguuacccgagcaacuuugcau

SEQ ID NO: 1688 - RNA, 23 nt, Artificial Sequence
  miRNA Sequence
augcaaaguugcucggguaaccu

SEQ ID NO: 1689 - RNA, 21 nt, Artificial Sequence
  miRNA Sequence
aauauaacacagauggccugu

SEQ ID NO: 1690 - RNA, 21 nt, Artificial Sequence
  miRNA Sequence
acaggccaucuguguuauauu

SEQ ID NO: 1691 - RNA, 22 nt, Artificial Sequence
  miRNA Sequence
uauguaacacgguccacuaacc

SEQ ID NO: 1692 - RNA, 22 nt, Artificial Sequence
  miRNA Sequence
gguuaguggaccguguuacaua

SEQ ID NO: 1693 - RNA, 21 nt, Artificial Sequence
  miRNA Sequence
uaguagaccguauagcguacg

SEQ ID NO: 1694 - RNA, 21 nt, Artificial Sequence
  miRNA Sequence
cguacgcuauacggucuacua

SEQ ID NO: 1695 - RNA, 23 nt, Artificial Sequence
  miRNA Sequence
acuucaccugguccacuagccgu

SEQ ID NO: 1696 - RNA, 23 nt, Artificial Sequence
  miRNA Sequence
acggcuaguggaccaggugaagu

SEQ ID NO: 1697 - RNA, 23 nt, Artificial Sequence
  miRNA Sequence
aucaacagacauuaauugggcgc

SEQ ID NO: 1698 - RNA, 23 nt, Artificial Sequence
  miRNA Sequence
gcgcccaauuaaugucuguugau

SEQ ID NO: 1699 - RNA, 22 nt, Artificial Sequence
  miRNA Sequence
acuggacuuagggucagaaggc

SEQ ID NO: 1700 - RNA, 22 nt, Artificial Sequence
  miRNA Sequence
gccuucugacccuaaguccagu

SEQ ID NO: 1701 - RNA, 23 nt, Artificial Sequence
  miRNA Sequence
agcucggucugaggccccucagu

SEQ ID NO: 1702 - RNA, 23 nt, Artificial Sequence
  miRNA Sequence
acugaggggccucagaccgagcu

SEQ ID NO: 1703 - RNA, 23 nt, Artificial Sequence
  miRNA Sequence
ugaggggcagagagcgagacuuu

SEQ ID NO: 1704 - RNA, 23 nt, Artificial Sequence
  miRNA Sequence
aaagucucgcucucugccccuca

SEQ ID NO: 1705 - RNA, 21 nt, Artificial Sequence
  miRNA Sequence
caaaacgugaggcgcugcuau

SEQ ID NO: 1706 - RNA, 21 nt, Artificial Sequence
  miRNA Sequence
auagcagcgccucacguuuug

SEQ ID NO: 1707 - RNA, 22 nt, Artificial Sequence
  miRNA Sequence
cagcagcaauucauguuuugaa

SEQ ID NO: 1708 - RNA, 22 nt, Artificial Sequence
  miRNA Sequence
uucaaaacaugaauugcugcug

SEQ ID NO: 1709 - RNA, 22 nt, Artificial Sequence
  miRNA Sequence
aucgggaaugucguguccgccc

SEQ ID NO: 1710 - RNA, 22 nt, Artificial Sequence
  miRNA Sequence
gggcggacacgacauucccgau

SEQ ID NO: 1711 - RNA, 23 nt, Artificial Sequence
  miRNA Sequence
aaugacacgaucacucccguuga

SEQ ID NO: 1712 - RNA, 23 nt, Artificial Sequence
  miRNA Sequence
ucaacgggagugaucgugucauu

SEQ ID NO: 1713 - RNA, 17 nt, Artificial Sequence
  miRNA Sequence
ccugagaaaagggccaa

SEQ ID NO: 1714 - RNA, 17 nt, Artificial Sequence
  miRNA Sequence
uuggcccuuuucucagg

SEQ ID NO: 1715 - RNA, 19 nt, Artificial Sequence
  miRNA Sequence
ggccacugagucagcacca

SEQ ID NO: 1716 - RNA, 19 nt, Artificial Sequence
  miRNA Sequence
uggugcugacucaguggcc

SEQ ID NO: 1717 - RNA, 18 nt, Artificial Sequence
  miRNA Sequence
agggcauguccagggggu

SEQ ID NO: 1718 - RNA, 18 nt, Artificial Sequence
  miRNA Sequence
acccccuggacaugcccu

SEQ ID NO: 1719 - RNA, 23 nt, Artificial Sequence
  miRNA Sequence
gccuggagcuacuccaccaucuc

SEQ ID NO: 1720 - RNA, 23 nt, Artificial Sequence
  miRNA Sequence
gagaugguggaguagcuccaggc

SEQ ID NO: 1721 - RNA, 17 nt, Artificial Sequence
  miRNA Sequence
caguguucagagaugga

SEQ ID NO: 1722 - RNA, 17 nt, Artificial Sequence
  miRNA Sequence
uccaucucugaacacug

SEQ ID NO: 1723 - RNA, 18 nt, Artificial Sequence
  miRNA Sequence
aucugaccugaugaaggu

SEQ ID NO: 1724 - RNA, 18 nt, Artificial Sequence
  miRNA Sequence
accuucaucaggucagau

SEQ ID NO: 1725 - RNA, 18 nt, Artificial Sequence
  miRNA Sequence
ccagagguggggacugag

SEQ ID NO: 1726 - RNA, 18 nt, Artificial Sequence
  miRNA Sequence
cucaguccccaccucugg

SEQ ID NO: 1727 - RNA, 17 nt, Artificial Sequence
  miRNA Sequence
ccccgccaccgccuugg

SEQ ID NO: 1728 - RNA, 17 nt, Artificial Sequence
  miRNA Sequence
ccaaggcgguggcgggg

SEQ ID NO: 1729 - RNA, 22 nt, Artificial Sequence
  miRNA Sequence
caguugggucuaggggucagga

SEQ ID NO: 1730 - RNA, 22 nt, Artificial Sequence
  miRNA Sequence
uccugaccccuagacccaacug

SEQ ID NO: 1731 - RNA, 19 nt, Artificial Sequence
  miRNA Sequence
cuuggggcauggaguccca

SEQ ID NO: 1732 - RNA, 19 nt, Artificial Sequence
  miRNA Sequence
ugggacuccaugccccaag

SEQ ID NO: 1733 - RNA, 16 nt, Artificial Sequence
  miRNA Sequence
aggaaacagggaccca

SEQ ID NO: 1734 - DNA, 16 bp, Artificial Sequence
  miRNA Sequence
tgggtccctgtttcct

SEQ ID NO: 1735 - RNA, 17 nt, Artificial Sequence
  miRNA Sequence
gacauucagacuaccug

SEQ ID NO: 1736 - RNA, 17 nt, Artificial Sequence
  miRNA Sequence
cagguagucugaauguc

SEQ ID NO: 1737 - RNA, 18 nt, Artificial Sequence
  miRNA Sequence
auucuaagugccuuggcc

SEQ ID NO: 1738 - RNA, 18 nt, Artificial Sequence
  miRNA Sequence
ggccaaggcacuuagaau

SEQ ID NO: 1739 - RNA, 17 nt, Artificial Sequence
  miRNA Sequence
acucagucauggucauu

SEQ ID NO: 1740 - RNA, 17 nt, Artificial Sequence
  miRNA Sequence
aaugaccaugacugagu

SEQ ID NO: 1741 - RNA, 19 nt, Artificial Sequence
  miRNA Sequence
cugugggcucagcucuggg

SEQ ID NO: 1742 - RNA, 19 nt, Artificial Sequence
  miRNA Sequence
cccagagcugagcccacag

SEQ ID NO: 1743 - RNA, 16 nt, Artificial Sequence
  miRNA Sequence
cuaggaggccuuggcc

SEQ ID NO: 1744 - RNA, 16 nt, Artificial Sequence
  miRNA Sequence
ggccaaggccuccuag

SEQ ID NO: 1745 - RNA, 16 nt, Artificial Sequence
  miRNA Sequence
uccagcucgguggcac

SEQ ID NO: 1746 - RNA, 16 nt, Artificial Sequence
  miRNA Sequence
gugccaccgagcugga

SEQ ID NO: 1747 - RNA, 21 nt, Artificial Sequence
  miRNA Sequence
ggcuccuccucucaggaugug

SEQ ID NO: 1748 - RNA, 21 nt, Artificial Sequence
  miRNA Sequence
cacauccugagaggaggagcc

SEQ ID NO: 1749 - RNA, 21 nt, Artificial Sequence
  miRNA Sequence
gcaggcacagacagcccuggc

SEQ ID NO: 1750 - RNA, 21 nt, Artificial Sequence
  miRNA Sequence
gccagggcugucugugccugc

SEQ ID NO: 1751 - RNA, 20 nt, Artificial Sequence
  miRNA Sequence
ucagggagucaggggagggc

SEQ ID NO: 1752 - RNA, 20 nt, Artificial Sequence
  miRNA Sequence
gcccuccccugacucccuga

SEQ ID NO: 1753 - RNA, 19 nt, Artificial Sequence
  miRNA Sequence
gggggaagaaaaggugggg

SEQ ID NO: 1754 - RNA, 19 nt, Artificial Sequence
  miRNA Sequence
ccccaccuuuucuuccccc

SEQ ID NO: 1755 - RNA, 18 nt, Artificial Sequence
  miRNA Sequence
cauucaacuagugauugu

SEQ ID NO: 1756 - RNA, 18 nt, Artificial Sequence
  miRNA Sequence
acaaucacuaguugaaug

SEQ ID NO: 1757 - RNA, 18 nt, Artificial Sequence
  miRNA Sequence
guguucucugauggacag

SEQ ID NO: 1758 - RNA, 18 nt, Artificial Sequence
  miRNA Sequence
cuguccaucagagaacac

SEQ ID NO: 1759 - RNA, 18 nt, Artificial Sequence
  miRNA Sequence
cagcagucccucccccug

SEQ ID NO: 1760 - RNA, 18 nt, Artificial Sequence
  miRNA Sequence
cagggggagggacugcug

SEQ ID NO: 1761 - RNA, 17 nt, Artificial Sequence
  miRNA Sequence
ccaauuaccacuucuuu

SEQ ID NO: 1762 - RNA, 17 nt, Artificial Sequence
  miRNA Sequence
aaagaagugguaauugg

SEQ ID NO: 1763 - RNA, 17 nt, Artificial Sequence
  miRNA Sequence
cucagugacucaugugc

SEQ ID NO: 1764 - RNA, 17 nt, Artificial Sequence
  miRNA Sequence
gcacaugagucacugag

SEQ ID NO: 1765 - RNA, 21 nt, Artificial Sequence
  miRNA Sequence
gcaguucugagcacaguacac

SEQ ID NO: 1766 - RNA, 21 nt, Artificial Sequence
  miRNA Sequence
guguacugugcucagaacugc

SEQ ID NO: 1767 - RNA, 18 nt, Artificial Sequence
  miRNA Sequence
cuaggggguuugcccuug

SEQ ID NO: 1768 - RNA, 18 nt, Artificial Sequence
  miRNA Sequence
caagggcaaacccccuag

SEQ ID NO: 1769 - RNA, 16 nt, Artificial Sequence
  miRNA Sequence
cucuccucccggcuuc

SEQ ID NO: 1770 - RNA, 16 nt, Artificial Sequence
  miRNA Sequence
gaagccgggaggagag

SEQ ID NO: 1771 - RNA, 21 nt, Artificial Sequence
  miRNA Sequence
gaguguaguucugagcagagc

SEQ ID NO: 1772 - RNA, 21 nt, Artificial Sequence
  miRNA Sequence
gcucugcucagaacuacacuc

SEQ ID NO: 1773 - RNA, 18 nt, Artificial Sequence
  miRNA Sequence
gggucccggggagggggg

SEQ ID NO: 1774 - RNA, 18 nt, Artificial Sequence
  miRNA Sequence
ccccccuccccgggaccc

SEQ ID NO: 1775 - RNA, 18 nt, Artificial Sequence
  miRNA Sequence
uaaaauuugcauccagga

SEQ ID NO: 1776 - RNA, 18 nt, Artificial Sequence
  miRNA Sequence
uccuggaugcaaauuuua

SEQ ID NO: 1777 - RNA, 17 nt, Artificial Sequence
  miRNA Sequence
uggggcucagcgaguuu

SEQ ID NO: 1778 - RNA, 17 nt, Artificial Sequence
  miRNA Sequence
aaacucgcugagcccca

SEQ ID NO: 1779 - RNA, 18 nt, Artificial Sequence
  miRNA Sequence
gggcucacaucaccccau

SEQ ID NO: 1780 - RNA, 18 nt, Artificial Sequence
  miRNA Sequence
auggggugaugugagccc

SEQ ID NO: 1781 - RNA, 18 nt, Artificial Sequence
  miRNA Sequence
gcggcgaguccgacucau

SEQ ID NO: 1782 - RNA, 18 nt, Artificial Sequence
  miRNA Sequence
augagucggacucgccgc

SEQ ID NO: 1783 - RNA, 17 nt, Artificial Sequence
  miRNA Sequence
accccacuccugguacc

SEQ ID NO: 1784 - RNA, 17 nt, Artificial Sequence
  miRNA Sequence
gguaccaggaguggggu

SEQ ID NO: 1785 - RNA, 19 nt, Artificial Sequence
  miRNA Sequence
ucucccuugagggcacuuu

SEQ ID NO: 1786 - RNA, 19 nt, Artificial Sequence
  miRNA Sequence
aaagugcccucaagggaga

SEQ ID NO: 1787 - RNA, 17 nt, Artificial Sequence
  miRNA Sequence
uugucugcugaguuucc

SEQ ID NO: 1788 - RNA, 17 nt, Artificial Sequence
  miRNA Sequence
ggaaacucagcagacaa

SEQ ID NO: 1789 - RNA, 19 nt, Artificial Sequence
  miRNA Sequence
gcauugugcagggcuauca

SEQ ID NO: 1790 - RNA, 19 nt, Artificial Sequence
  miRNA Sequence
ugauagcccugcacaaugc

SEQ ID NO: 1791 - RNA, 22 nt, Artificial Sequence
  miRNA Sequence
uaauacugucugguaaaaccgu

SEQ ID NO: 1792 - RNA, 22 nt, Artificial Sequence
  miRNA Sequence
acgguuuuaccagacaguauua

SEQ ID NO: 1793 - RNA, 19 nt, Artificial Sequence
  miRNA Sequence
ugcccuccuuucuucccuc

SEQ ID NO: 1794 - RNA, 19 nt, Artificial Sequence
  miRNA Sequence
gagggaagaaaggagggca

SEQ ID NO: 1795 - RNA, 16 nt, Artificial Sequence
  miRNA Sequence
uucagcaggaacagcu

SEQ ID NO: 1796 - RNA, 16 nt, Artificial Sequence
  miRNA Sequence
agcuguuccugcugaa

SEQ ID NO: 1797 - RNA, 18 nt, Artificial Sequence
  miRNA Sequence
ccccugggccggccuugg

SEQ ID NO: 1798 - RNA, 18 nt, Artificial Sequence
  miRNA Sequence
ccaaggccggcccagggg

SEQ ID NO: 1799 - RNA, 17 nt, Artificial Sequence
  miRNA Sequence
cagccugacaggaacag

SEQ ID NO: 1800 - RNA, 17 nt, Artificial Sequence
  miRNA Sequence
cuguuccugucaggcug

SEQ ID NO: 1801 - RNA, 17 nt, Artificial Sequence
  miRNA Sequence
gggagucuacagcaggg

SEQ ID NO: 1802 - RNA, 17 nt, Artificial Sequence
  miRNA Sequence
cccugcuguagacuccc

SEQ ID NO: 1803 - RNA, 18 nt, Artificial Sequence
  miRNA Sequence
cagugcaauguuuuccuu

SEQ ID NO: 1804 - RNA, 18 nt, Artificial Sequence
  miRNA Sequence
aaggaaaacauugcacug

SEQ ID NO: 1805 - RNA, 17 nt, Artificial Sequence
  miRNA Sequence
augugggcucaggcuca

SEQ ID NO: 1806 - RNA, 17 nt, Artificial Sequence
  miRNA Sequence
ugagccugagcccacau

SEQ ID NO: 1807 - RNA, 16 nt, Artificial Sequence
  miRNA Sequence
ugccuuccugucugug

SEQ ID NO: 1808 - RNA, 16 nt, Artificial Sequence
  miRNA Sequence
cacagacaggaaggca

SEQ ID NO: 1809 - RNA, 22 nt, Artificial Sequence
  miRNA Sequence
cugggacaggaggaggaggcag

SEQ ID NO: 1810 - RNA, 22 nt, Artificial Sequence
  miRNA Sequence
cugccuccuccuccugucccag

SEQ ID NO: 1811 - RNA, 18 nt, Artificial Sequence
  miRNA Sequence
gcuggugacaugagaggc

SEQ ID NO: 1812 - RNA, 18 nt, Artificial Sequence
  miRNA Sequence
gccucucaugucaccagc

SEQ ID NO: 1813 - RNA, 18 nt, Artificial Sequence
  miRNA Sequence
ugggagcuggacuacuuc

SEQ ID NO: 1814 - RNA, 18 nt, Artificial Sequence
  miRNA Sequence
gaaguaguccagcuccca

SEQ ID NO: 1815 - RNA, 20 nt, Artificial Sequence
  miRNA Sequence
ucccacuacuucacuuguga

SEQ ID NO: 1816 - RNA, 20 nt, Artificial Sequence
  miRNA Sequence
ucacaagugaaguaguggga

SEQ ID NO: 1817 - RNA, 18 nt, Artificial Sequence
  miRNA Sequence
ccaguguggcucagcgag

SEQ ID NO: 1818 - RNA, 18 nt, Artificial Sequence
  miRNA Sequence
cucgcugagccacacugg

SEQ ID NO: 1819 - RNA, 17 nt, Artificial Sequence
  miRNA Sequence
uucugagcugaggacag

SEQ ID NO: 1820 - RNA, 17 nt, Artificial Sequence
  miRNA Sequence
cuguccucagcucagaa

SEQ ID NO: 1821 - RNA, 17 nt, Artificial Sequence
  miRNA Sequence
ccggcauguccagggca

SEQ ID NO: 1822 - RNA, 17 nt, Artificial Sequence
  miRNA Sequence
ugcccuggacaugccgg

SEQ ID NO: 1823 - RNA, 18 nt, Artificial Sequence
  miRNA Sequence
ccuagacaccuccaguuc

SEQ ID NO: 1824 - RNA, 18 nt, Artificial Sequence
  miRNA Sequence
gaacuggaggugucuagg

SEQ ID NO: 1825 - RNA, 17 nt, Artificial Sequence
  miRNA Sequence
uggagagaaaggcagua

SEQ ID NO: 1826 - RNA, 17 nt, Artificial Sequence
  miRNA Sequence
uacugccuuucucucca

SEQ ID NO: 1827 - RNA, 19 nt, Artificial Sequence
  miRNA Sequence
aauguuuuuuccuguuucc

SEQ ID NO: 1828 - RNA, 19 nt, Artificial Sequence
  miRNA Sequence
ggaaacaggaaaaaacauu

SEQ ID NO: 1829 - RNA, 18 nt, Artificial Sequence
  miRNA Sequence
ucccuggaguuucuucuu

SEQ ID NO: 1830 - RNA, 18 nt, Artificial Sequence
  miRNA Sequence
aagaagaaacuccaggga

SEQ ID NO: 1831 - RNA, 18 nt, Artificial Sequence
  miRNA Sequence
cuggagucuaggauucca

SEQ ID NO: 1832 - RNA, 18 nt, Artificial Sequence
  miRNA Sequence
uggaauccuagacuccag

SEQ ID NO: 1833 - RNA, 22 nt, Artificial Sequence
  miRNA Sequence
caggucgucuugcagggcuucu

SEQ ID NO: 1834 - RNA, 22 nt, Artificial Sequence
  miRNA Sequence
agaagcccugcaagacgaccug

SEQ ID NO: 1835 - RNA, 21 nt, Artificial Sequence
  miRNA Sequence
ugucuugcaggccgucaugca

SEQ ID NO: 1836 - RNA, 21 nt, Artificial Sequence
  miRNA Sequence
ugcaugacggccugcaagaca

SEQ ID NO: 1837 - RNA, 16 nt, Artificial Sequence
  miRNA Sequence
gcagcauucauguccc

SEQ ID NO: 1838 - RNA, 16 nt, Artificial Sequence
  miRNA Sequence
gggacaugaaugcugc

SEQ ID NO: 1839 - RNA, 18 nt, Artificial Sequence
  miRNA Sequence
gaaagagagcugagugug

SEQ ID NO: 1840 - RNA, 18 nt, Artificial Sequence
  miRNA Sequence
cacacucagcucucuuuc

SEQ ID NO: 1841 - RNA, 19 nt, Artificial Sequence
  miRNA Sequence
ggccuuguuccugucccca

SEQ ID NO: 1842 - RNA, 19 nt, Artificial Sequence
  miRNA Sequence
uggggacaggaacaaggcc

SEQ ID NO: 1843 - RNA, 20 nt, Artificial Sequence
  miRNA Sequence
agcccccuggccccaaaccc

SEQ ID NO: 1844 - RNA, 20 nt, Artificial Sequence
  miRNA Sequence
ggguuuggggccagggggcu

SEQ ID NO: 1845 - RNA, 18 nt, Artificial Sequence
  miRNA Sequence
cucugggaaaugggacag

SEQ ID NO: 1846 - RNA, 18 nt, Artificial Sequence
  miRNA Sequence
cugucccauuucccagag

SEQ ID NO: 1847 - RNA, 18 nt, Artificial Sequence
  miRNA Sequence
ccgcuuucugagcuggac

SEQ ID NO: 1848 - RNA, 18 nt, Artificial Sequence
  miRNA Sequence
guccagcucagaaagcgg

SEQ ID NO: 1849 - RNA, 17 nt, Artificial Sequence
  miRNA Sequence
ggugaggcuagcuggug

SEQ ID NO: 1850 - RNA, 17 nt, Artificial Sequence
  miRNA Sequence
caccagcuagccucacc

SEQ ID NO: 1851 - RNA, 17 nt, Artificial Sequence
  miRNA Sequence
acauugccagggaguuu

SEQ ID NO: 1852 - RNA, 17 nt, Artificial Sequence
  miRNA Sequence
aaacucccuggcaaugu

SEQ ID NO: 1853 - RNA, 17 nt, Artificial Sequence
  miRNA Sequence
cacuguggguacaugcu

SEQ ID NO: 1854 - RNA, 17 nt, Artificial Sequence
  miRNA Sequence
agcauguacccacagug

SEQ ID NO: 1855 - RNA, 17 nt, Artificial Sequence
  miRNA Sequence
ucccugagcaaagccac

SEQ ID NO: 1856 - RNA, 17 nt, Artificial Sequence
  miRNA Sequence
guggcuuugcucaggga

SEQ ID NO: 1857 - RNA, 21 nt, Artificial Sequence
  miRNA Sequence
cuggauggcuccuccaugucu

SEQ ID NO: 1858 - RNA, 21 nt, Artificial Sequence
  miRNA Sequence
agacauggaggagccauccag

SEQ ID NO: 1859 - RNA, 23 nt, Artificial Sequence
  miRNA Sequence
ucuuggaguaggucauugggugg

SEQ ID NO: 1860 - RNA, 23 nt, Artificial Sequence
  miRNA Sequence
ccacccaaugaccuacuccaaga

SEQ ID NO: 1861 - RNA, 18 nt, Artificial Sequence
  miRNA Sequence
gggauucuguagcuuccu

SEQ ID NO: 1862 - RNA, 18 nt, Artificial Sequence
  miRNA Sequence
aggaagcuacagaauccc

SEQ ID NO: 1863 - RNA, 21 nt, Artificial Sequence
  miRNA Sequence
uuagcgguggaccgcccugcg

SEQ ID NO: 1864 - RNA, 21 nt, Artificial Sequence
  miRNA Sequence
cgcagggcgguccaccgcuaa

SEQ ID NO: 1865 - RNA, 21 nt, Artificial Sequence
  miRNA Sequence
cugugggcucagcgcgugggg

SEQ ID NO: 1866 - RNA, 21 nt, Artificial Sequence
  miRNA Sequence
ccccacgcgcugagcccacag

SEQ ID NO: 1867 - RNA, 18 nt, Artificial Sequence
  miRNA Sequence
cagccccacagccucaga

SEQ ID NO: 1868 - RNA, 18 nt, Artificial Sequence
  miRNA Sequence
ucugaggcuguggggcug

SEQ ID NO: 1869 - RNA, 20 nt, Artificial Sequence
  miRNA Sequence
cccugagacccuaaccuuaa

SEQ ID NO: 1870 - RNA, 20 nt, Artificial Sequence
  miRNA Sequence
uuaagguuagggucucaggg

SEQ ID NO: 1871 - RNA, 18 nt, Artificial Sequence
  miRNA Sequence
uugcacuugucucaguga

SEQ ID NO: 1872 - RNA, 18 nt, Artificial Sequence
  miRNA Sequence
ucacugagacaagugcaa

SEQ ID NO: 1873 - RNA, 20 nt, Artificial Sequence
  miRNA Sequence
uguuccucugucucccagac

SEQ ID NO: 1874 - RNA, 20 nt, Artificial Sequence
  miRNA Sequence
gucugggagacagaggaaca

SEQ ID NO: 1875 - RNA, 19 nt, Artificial Sequence
  miRNA Sequence
ggcuugcaugggggacugg

SEQ ID NO: 1876 - RNA, 19 nt, Artificial Sequence
  miRNA Sequence
ccagucccccaugcaagcc

SEQ ID NO: 1877 - RNA, 17 nt, Artificial Sequence
  miRNA Sequence
ccaguuuucccaggauu

SEQ ID NO: 1878 - RNA, 17 nt, Artificial Sequence
  miRNA Sequence
aauccugggaaaacugg

SEQ ID NO: 1879 - RNA, 19 nt, Artificial Sequence
  miRNA Sequence
ccugagacccuaguuccac

SEQ ID NO: 1880 - RNA, 19 nt, Artificial Sequence
  miRNA Sequence
guggaacuagggucucagg

SEQ ID NO: 1881 - RNA, 22 nt, Artificial Sequence
  miRNA Sequence
aucaugaugggcuccucggugu

SEQ ID NO: 1882 - RNA, 22 nt, Artificial Sequence
  miRNA Sequence
acaccgaggagcccaucaugau

SEQ ID NO: 1883 - RNA, 19 nt, Artificial Sequence
  miRNA Sequence
ccucagaucagagccuugc

SEQ ID NO: 1884 - RNA, 19 nt, Artificial Sequence
  miRNA Sequence
gcaaggcucugaucugagg

SEQ ID NO: 1885 - RNA, 18 nt, Artificial Sequence
  miRNA Sequence
ggugggcuucccggaggg

SEQ ID NO: 1886 - RNA, 18 nt, Artificial Sequence
  miRNA Sequence
cccuccgggaagcccacc

SEQ ID NO: 1887 - RNA, 18 nt, Artificial Sequence
  miRNA Sequence
cacugcaggacucagcag

SEQ ID NO: 1888 - RNA, 18 nt, Artificial Sequence
  miRNA Sequence
cugcugaguccugcagug

SEQ ID NO: 1889 - RNA, 17 nt, Artificial Sequence
  miRNA Sequence
ugagggaggagacugca

SEQ ID NO: 1890 - RNA, 17 nt, Artificial Sequence
  miRNA Sequence
ugcagucuccucccuca

SEQ ID NO: 1891 - RNA, 18 nt, Artificial Sequence
  miRNA Sequence
gaggcugaaggaagaugg

SEQ ID NO: 1892 - RNA, 18 nt, Artificial Sequence
  miRNA Sequence
ccaucuuccuucagccuc

SEQ ID NO: 1893 - RNA, 22 nt, Artificial Sequence
  miRNA Sequence
gucacugaugucuguagcugag

SEQ ID NO: 1894 - RNA, 22 nt, Artificial Sequence
  miRNA Sequence
cucagcuacagacaucagugac

SEQ ID NO: 1895 - RNA, 22 nt, Artificial Sequence
  miRNA Sequence
accugucuguggaaaggagcua

SEQ ID NO: 1896 - RNA, 22 nt, Artificial Sequence
  miRNA Sequence
uagcuccuuuccacagacaggu

SEQ ID NO: 1897 - RNA, 21 nt, Artificial Sequence
  miRNA Sequence
aaaagcaucaggaaguaccca

SEQ ID NO: 1898 - RNA, 21 nt, Artificial Sequence
  miRNA Sequence
uggguacuuccugaugcuuuu

SEQ ID NO: 1899 - RNA, 21 nt, Artificial Sequence
  miRNA Sequence
auaggcaccaaaaagcaacaa

SEQ ID NO: 1900 - RNA, 21 nt, Artificial Sequence
  miRNA Sequence
uuguugcuuuuuggugccuau

SEQ ID NO: 1901 - RNA, 22 nt, Artificial Sequence
  miRNA Sequence
aguugccuuuuuguucccaugc

SEQ ID NO: 1902 - RNA, 22 nt, Artificial Sequence
  miRNA Sequence
gcaugggaacaaaaaggcaacu

SEQ ID NO: 1903 - RNA, 22 nt, Artificial Sequence
  miRNA Sequence
agaguuaacucaaaauggacua

SEQ ID NO: 1904 - RNA, 22 nt, Artificial Sequence
  miRNA Sequence
uaguccauuuugaguuaacucu

SEQ ID NO: 1905 - RNA, 22 nt, Artificial Sequence
  miRNA Sequence
uguugggauucagcaggaccau

SEQ ID NO: 1906 - RNA, 22 nt, Artificial Sequence
  miRNA Sequence
augguccugcugaaucccaaca

SEQ ID NO: 1907 - RNA, 17 nt, Artificial Sequence
  miRNA Sequence
gaagauggacguacuuu

SEQ ID NO: 1908 - RNA, 17 nt, Artificial Sequence
  miRNA Sequence
aaaguacguccaucuuc

SEQ ID NO: 1909 - RNA, 21 nt, Artificial Sequence
  miRNA Sequence
ucugaauagagucugaagagu

SEQ ID NO: 1910 - RNA, 21 nt, Artificial Sequence
  miRNA Sequence
acucuucagacucuauucaga

SEQ ID NO: 1911 - RNA, 22 nt, Artificial Sequence
  miRNA Sequence
caaggagacgggaacauggagc

SEQ ID NO: 1912 - RNA, 22 nt, Artificial Sequence
  miRNA Sequence
gcuccauguucccgucuccuug

SEQ ID NO: 1913 - RNA, 20 nt, Artificial Sequence
  miRNA Sequence
aaaagcugggcugagaggcg

SEQ ID NO: 1914 - RNA, 20 nt, Artificial Sequence
  miRNA Sequence
cgccucucagcccagcuuuu

SEQ ID NO: 1915 - RNA, 18 nt, Artificial Sequence
  miRNA Sequence
aggcuggagugagcggag

SEQ ID NO: 1916 - RNA, 18 nt, Artificial Sequence
  miRNA Sequence
cuccgcucacuccagccu

SEQ ID NO: 1917 - RNA, 22 nt, Artificial Sequence
  miRNA Sequence
gcgacucugaaaacuagaaggu

SEQ ID NO: 1918 - RNA, 22 nt, Artificial Sequence
  miRNA Sequence
accuucuaguuuucagagucgc

SEQ ID NO: 1919 - RNA, 20 nt, Artificial Sequence
  miRNA Sequence
aaagacucugcaagaugccu

SEQ ID NO: 1920 - RNA, 20 nt, Artificial Sequence
  miRNA Sequence
aggcaucuugcagagucuuu

SEQ ID NO: 1921 - RNA, 21 nt, Artificial Sequence
  miRNA Sequence
acaggagugggggugggacau

SEQ ID NO: 1922 - RNA, 21 nt, Artificial Sequence
  miRNA Sequence
augucccacccccacuccugu

SEQ ID NO: 1923 - RNA, 21 nt, Artificial Sequence
  miRNA Sequence
cgucccaccccccacuccugu

SEQ ID NO: 1924 - RNA, 21 nt, Artificial Sequence
  miRNA Sequence
acaggaguggggggugggacg

SEQ ID NO: 1925 - RNA, 18 nt, Artificial Sequence
  miRNA Sequence
aggagaaguaaaguagaa

SEQ ID NO: 1926 - RNA, 18 nt, Artificial Sequence
  miRNA Sequence
uucuacuuuacuucuccu

SEQ ID NO: 1927 - RNA, 22 nt, Artificial Sequence
  miRNA Sequence
auggccagagcucacacagagg

SEQ ID NO: 1928 - RNA, 22 nt, Artificial Sequence
  miRNA Sequence
ccucugugugagcucuggccau

SEQ ID NO: 1929 - RNA, 21 nt, Artificial Sequence
  miRNA Sequence
gcaggacaggcagaaguggau

SEQ ID NO: 1930 - RNA, 21 nt, Artificial Sequence
  miRNA Sequence
auccacuucugccuguccugc

SEQ ID NO: 1931 - RNA, 22 nt, Artificial Sequence
  miRNA Sequence
cagggcaggaagaaguggacaa

SEQ ID NO: 1932 - RNA, 22 nt, Artificial Sequence
  miRNA Sequence
uuguccacuucuuccugcccug

SEQ ID NO: 1933 - RNA, 22 nt, Artificial Sequence
  miRNA Sequence
guccacuucugccugcccugcc

SEQ ID NO: 1934 - RNA, 22 nt, Artificial Sequence
  miRNA Sequence
ggcagggcaggcagaaguggac

SEQ ID NO: 1935 - RNA, 21 nt, Artificial Sequence
  miRNA Sequence
ugggcucaggguacaaagguu

SEQ ID NO: 1936 - RNA, 21 nt, Artificial Sequence
  miRNA Sequence
aaccuuuguacccugagccca

SEQ ID NO: 1937 - RNA, 21 nt, Artificial Sequence
  miRNA Sequence
cacaggcuuagaaaagacagu

SEQ ID NO: 1938 - RNA, 21 nt, Artificial Sequence
  miRNA Sequence
acugucuuuucuaagccugug

SEQ ID NO: 1939 - RNA, 22 nt, Artificial Sequence
  miRNA Sequence
gugacugauaccuuggaggcau

SEQ ID NO: 1940 - RNA, 22 nt, Artificial Sequence
  miRNA Sequence
augccuccaagguaucagucac

SEQ ID NO: 1941 - RNA, 22 nt, Artificial Sequence
  miRNA Sequence
ugucguggggcuugcuggcuug

SEQ ID NO: 1942 - RNA, 22 nt, Artificial Sequence
  miRNA Sequence
caagccagcaagccccacgaca

SEQ ID NO: 1943 - RNA, 17 nt, Artificial Sequence
  miRNA Sequence
acagggaggagauugua

SEQ ID NO: 1944 - RNA, 17 nt, Artificial Sequence
  miRNA Sequence
uacaaucuccucccugu

SEQ ID NO: 1945 - RNA, 17 nt, Artificial Sequence
  miRNA Sequence
gccggacaagagggagg

SEQ ID NO: 1946 - DNA, 17 bp, Artificial Sequence
  miRNA Sequence
cctccctcttgtccggc

SEQ ID NO: 1947 - RNA, 17 nt, Artificial Sequence
  miRNA Sequence
uuggaggcguggguuuu

SEQ ID NO: 1948 - RNA, 17 nt, Artificial Sequence
  miRNA Sequence
aaaacccacgccuccaa

SEQ ID NO: 1949 - RNA, 18 nt, Artificial Sequence
  miRNA Sequence
cucgaguuggaagaggcg

SEQ ID NO: 1950 - RNA, 18 nt, Artificial Sequence
  miRNA Sequence
cgccucuuccaacucgag

SEQ ID NO: 1951 - RNA, 21 nt, Artificial Sequence
  miRNA Sequence
cacggcaaaagaaacaaucca

SEQ ID NO: 1952 - RNA, 21 nt, Artificial Sequence
  miRNA Sequence
uggauuguuucuuuugccgug

SEQ ID NO: 1953 - RNA, 22 nt, Artificial Sequence
  miRNA Sequence
agauuguuucuuuugccgugca

SEQ ID NO: 1954 - RNA, 22 nt, Artificial Sequence
  miRNA Sequence
ugcacggcaaaagaaacaaucu

SEQ ID NO: 1955 - RNA, 22 nt, Artificial Sequence
  miRNA Sequence
cagggcuggcagugacaugggu

SEQ ID NO: 1956 - RNA, 22 nt, Artificial Sequence
  miRNA Sequence
acccaugucacugccagcccug

SEQ ID NO: 1957 - RNA, 22 nt, Artificial Sequence
  miRNA Sequence
auuucccugccauucccuuggc

SEQ ID NO: 1958 - RNA, 22 nt, Artificial Sequence
  miRNA Sequence
gccaagggaauggcagggaaau

SEQ ID NO: 1959 - RNA, 17 nt, Artificial Sequence
  miRNA Sequence
ggugggggcuguuguuu

SEQ ID NO: 1960 - RNA, 17 nt, Artificial Sequence
  miRNA Sequence
aaacaacagcccccacc

SEQ ID NO: 1961 - RNA, 20 nt, Artificial Sequence
  miRNA Sequence
ggcuccuuggucuaggggua

SEQ ID NO: 1962 - RNA, 20 nt, Artificial Sequence
  miRNA Sequence
uaccccuagaccaaggagcc

SEQ ID NO: 1963 - RNA, 22 nt, Artificial Sequence
  miRNA Sequence
cgucccggggcugcgcgaggca

SEQ ID NO: 1964 - RNA, 22 nt, Artificial Sequence
  miRNA Sequence
ugccucgcgcagccccgggacg

SEQ ID NO: 1965 - RNA, 22 nt, Artificial Sequence
  miRNA Sequence
uggggauuuggagaagugguga

SEQ ID NO: 1966 - RNA, 22 nt, Artificial Sequence
  miRNA Sequence
ucaccacuucuccaaaucccca

SEQ ID NO: 1967 - RNA, 17 nt, Artificial Sequence
  miRNA Sequence
ugguagagcugaggaca

SEQ ID NO: 1968 - RNA, 17 nt, Artificial Sequence
  miRNA Sequence
uguccucagcucuacca

SEQ ID NO: 1969 - RNA, 23 nt, Artificial Sequence
  miRNA Sequence
uugaauucuuggccuuaagugau

SEQ ID NO: 1970 - RNA, 23 nt, Artificial Sequence
  miRNA Sequence
aucacuuaaggccaagaauucaa

SEQ ID NO: 1971 - RNA, 20 nt, Artificial Sequence
  miRNA Sequence
gagcuuggucuguagcgguu

SEQ ID NO: 1972 - RNA, 20 nt, Artificial Sequence
  miRNA Sequence
aaccgcuacagaccaagcuc

SEQ ID NO: 1973 - RNA, 20 nt, Artificial Sequence
  miRNA Sequence
ggauccgagucacggcacca

SEQ ID NO: 1974 - RNA, 20 nt, Artificial Sequence
  miRNA Sequence
uggugccgugacucggaucc

SEQ ID NO: 1975 - RNA, 17 nt, Artificial Sequence
  miRNA Sequence
aggguguguguguuuuu

SEQ ID NO: 1976 - RNA, 17 nt, Artificial Sequence
  miRNA Sequence
aaaaacacacacacccu

SEQ ID NO: 1977 - RNA, 17 nt, Artificial Sequence
  miRNA Sequence
ccugguggcuuccuuuu

SEQ ID NO: 1978 - RNA, 17 nt, Artificial Sequence
  miRNA Sequence
aaaaggaagccaccagg

SEQ ID NO: 1979 - RNA, 22 nt, Artificial Sequence
  miRNA Sequence
ucacaagguauugacuggcgua

SEQ ID NO: 1980 - RNA, 22 nt, Artificial Sequence
  miRNA Sequence
uacgccagucaauaccuuguga

SEQ ID NO: 1981 - RNA, 19 nt, Artificial Sequence
  miRNA Sequence
agagguagguguggaagaa

SEQ ID NO: 1982 - RNA, 19 nt, Artificial Sequence
  miRNA Sequence
uucuuccacaccuaccucu

SEQ ID NO: 1983 - RNA, 22 nt, Artificial Sequence
  miRNA Sequence
ccaggaggcggaggagguggag

SEQ ID NO: 1984 - RNA, 22 nt, Artificial Sequence
  miRNA Sequence
cuccaccuccuccgccuccugg

SEQ ID NO: 1985 - RNA, 22 nt, Artificial Sequence
  miRNA Sequence
auagugguugugaauuuaccuu

SEQ ID NO: 1986 - RNA, 22 nt, Artificial Sequence
  miRNA Sequence
aagguaaauucacaaccacuau

SEQ ID NO: 1987 - RNA, 23 nt, Artificial Sequence
  miRNA Sequence
gauugagacuaguagggcuaggc

SEQ ID NO: 1988 - RNA, 23 nt, Artificial Sequence
  miRNA Sequence
gccuagcccuacuagucucaauc

SEQ ID NO: 1989 - RNA, 23 nt, Artificial Sequence
  miRNA Sequence
ugacacggaggguggcuugggaa

SEQ ID NO: 1990 - RNA, 23 nt, Artificial Sequence
  miRNA Sequence
uucccaagccacccuccguguca

SEQ ID NO: 1991 - RNA, 17 nt, Artificial Sequence
  miRNA Sequence
gagacugggguggggcc

SEQ ID NO: 1992 - RNA, 17 nt, Artificial Sequence
  miRNA Sequence
ggccccaccccagucuc

SEQ ID NO: 1993 - RNA, 21 nt, Artificial Sequence
  miRNA Sequence
aagguuuggauagaugcaaua

SEQ ID NO: 1994 - RNA, 21 nt, Artificial Sequence
  miRNA Sequence
uauugcaucuauccaaaccuu

SEQ ID NO: 1995 - RNA, 22 nt, Artificial Sequence
  miRNA Sequence
cucaaguagucugaccagggga

SEQ ID NO: 1996 - RNA, 22 nt, Artificial Sequence
  miRNA Sequence
uccccuggucagacuacuugag

SEQ ID NO: 1997 - RNA, 18 nt, Artificial Sequence
  miRNA Sequence
gggugcgggccggcgggg

SEQ ID NO: 1998 - RNA, 18 nt, Artificial Sequence
  miRNA Sequence
ccccgccggcccgcaccc

SEQ ID NO: 1999 - RNA, 22 nt, Artificial Sequence
  miRNA Sequence
uggcggcgguaguuaugggcuu

SEQ ID NO: 2000 - RNA, 22 nt, Artificial Sequence
  miRNA Sequence
aagcccauaacuaccgccgcca

SEQ ID NO: 2001 - RNA, 18 nt, Artificial Sequence
  miRNA Sequence
agagcagaaggaugagau

SEQ ID NO: 2002 - RNA, 18 nt, Artificial Sequence
  miRNA Sequence
aucucauccuucugcucu

SEQ ID NO: 2003 - RNA, 22 nt, Artificial Sequence
  miRNA Sequence
gcucccucuagggucgcucgga

SEQ ID NO: 2004 - RNA, 22 nt, Artificial Sequence
  miRNA Sequence
uccgagcgacccuagagggagc

SEQ ID NO: 2005 - RNA, 21 nt, Artificial Sequence
  miRNA Sequence
uggcaaacguggaagccgaga

SEQ ID NO: 2006 - RNA, 21 nt, Artificial Sequence
  miRNA Sequence
ucucggcuuccacguuugcca

SEQ ID NO: 2007 - RNA, 22 nt, Artificial Sequence
  miRNA Sequence
ugggaacuuaguagagguuuaa

SEQ ID NO: 2008 - RNA, 22 nt, Artificial Sequence
  miRNA Sequence
uuaaaccucuacuaaguuccca

SEQ ID NO: 2009 - RNA, 18 nt, Artificial Sequence
  miRNA Sequence
ggugggggguguuguuuu

SEQ ID NO: 2010 - RNA, 18 nt, Artificial Sequence
  miRNA Sequence
aaaacaacaccccccacc

SEQ ID NO: 2011 - RNA, 22 nt, Artificial Sequence
  miRNA Sequence
cuagugcucuccguuacaagua

SEQ ID NO: 2012 - RNA, 22 nt, Artificial Sequence
  miRNA Sequence
uacuuguaacggagagcacuag

SEQ ID NO: 2013 - RNA, 22 nt, Artificial Sequence
  miRNA Sequence
uuguggcuggucaugaggcuaa

SEQ ID NO: 2014 - RNA, 22 nt, Artificial Sequence
  miRNA Sequence
uuagccucaugaccagccacaa

SEQ ID NO: 2015 - RNA, 21 nt, Artificial Sequence
  miRNA Sequence
uuagucucaugaucagacaca

SEQ ID NO: 2016 - RNA, 21 nt, Artificial Sequence
  miRNA Sequence
ugugucugaucaugagacuaa

SEQ ID NO: 2017 - RNA, 22 nt, Artificial Sequence
  miRNA Sequence
caagggaccaagcauucauuau

SEQ ID NO: 2018 - RNA, 22 nt, Artificial Sequence
  miRNA Sequence
auaaugaaugcuuggucccuug

SEQ ID NO: 2019 - RNA, 22 nt, Artificial Sequence
  miRNA Sequence
caggaaggauuuagggacaggc

SEQ ID NO: 2020 - RNA, 22 nt, Artificial Sequence
  miRNA Sequence
gccugucccuaaauccuuccug

SEQ ID NO: 2021 - RNA, 22 nt, Artificial Sequence
  miRNA Sequence
cuauuaaggacauuugugauuc

SEQ ID NO: 2022 - RNA, 22 nt, Artificial Sequence
  miRNA Sequence
gaaucacaaauguccuuaauag

SEQ ID NO: 2023 - RNA, 22 nt, Artificial Sequence
  miRNA Sequence
auuaaggacauuugugauugau

SEQ ID NO: 2024 - RNA, 22 nt, Artificial Sequence
  miRNA Sequence
aucaaucacaaauguccuuaau

SEQ ID NO: 2025 - RNA, 17 nt, Artificial Sequence
  miRNA Sequence
gaggcugagcugaggag

SEQ ID NO: 2026 - RNA, 17 nt, Artificial Sequence
  miRNA Sequence
cuccucagcucagccuc

SEQ ID NO: 2027 - RNA, 22 nt, Artificial Sequence
  miRNA Sequence
cgcgcggccgugcucggagcag

SEQ ID NO: 2028 - RNA, 22 nt, Artificial Sequence
  miRNA Sequence
cugcuccgagcacggccgcgcg

SEQ ID NO: 2029 - RNA, 22 nt, Artificial Sequence
  miRNA Sequence
uugcauauguaggaugucccau

SEQ ID NO: 2030 - RNA, 22 nt, Artificial Sequence
  miRNA Sequence
augggacauccuacauaugcaa

SEQ ID NO: 2031 - RNA, 21 nt, Artificial Sequence
  miRNA Sequence
agccaaguggaaguuacuuua

SEQ ID NO: 2032 - RNA, 21 nt, Artificial Sequence
  miRNA Sequence
uaaaguaacuuccacuuggcu

SEQ ID NO: 2033 - RNA, 17 nt, Artificial Sequence
  miRNA Sequence
ggagugggcuggugguu

SEQ ID NO: 2034 - RNA, 17 nt, Artificial Sequence
  miRNA Sequence
aaccaccagcccacucc

SEQ ID NO: 2035 - RNA, 22 nt, Artificial Sequence
  miRNA Sequence
uuucuauuucucaguggggcuc

SEQ ID NO: 2036 - RNA, 22 nt, Artificial Sequence
  miRNA Sequence
gagccccacugagaaauagaaa

SEQ ID NO: 2037 - RNA, 22 nt, Artificial Sequence
  miRNA Sequence
aacccagugggcuauggaaaug

SEQ ID NO: 2038 - RNA, 22 nt, Artificial Sequence
  miRNA Sequence
cauuuccauagcccacuggguu

SEQ ID NO: 2039 - RNA, 17 nt, Artificial Sequence
  miRNA Sequence
gggguggucuguuguug

SEQ ID NO: 2040 - RNA, 17 nt, Artificial Sequence
  miRNA Sequence
caacaacagaccacccc

SEQ ID NO: 2041 - RNA, 20 nt, Artificial Sequence
  miRNA Sequence
aaaaggcgggagaagcccca

SEQ ID NO: 2042 - DNA, 20 bp, Artificial Sequence
  miRNA Sequence
tggggcttctcccgcctttt

SEQ ID NO: 2043 - RNA, 20 nt, Artificial Sequence
  miRNA Sequence
uaacggccgcgguacccuaa

SEQ ID NO: 2044 - RNA, 20 nt, Artificial Sequence
  miRNA Sequence
uuaggguaccgcggccguua

SEQ ID NO: 2045 - RNA, 17 nt, Artificial Sequence
  miRNA Sequence
gcugggcgaggcuggca

SEQ ID NO: 2046 - RNA, 17 nt, Artificial Sequence
  miRNA Sequence
ugccagccucgcccagc

SEQ ID NO: 2047 - RNA, 19 nt, Artificial Sequence
  miRNA Sequence
agagcuggcugaagggcag

SEQ ID NO: 2048 - RNA, 19 nt, Artificial Sequence
  miRNA Sequence
cugcccuucagccagcucu

SEQ ID NO: 2049 - RNA, 18 nt, Artificial Sequence
  miRNA Sequence
agggggcgggcuccggcg

SEQ ID NO: 2050 - RNA, 18 nt, Artificial Sequence
  miRNA Sequence
cgccggagcccgcccccu

SEQ ID NO: 2051 - RNA, 21 nt, Artificial Sequence
  miRNA Sequence
uggggcuagugaugcaggacg

SEQ ID NO: 2052 - RNA, 21 nt, Artificial Sequence
  miRNA Sequence
cguccugcaucacuagcccca

SEQ ID NO: 2053 - RNA, 22 nt, Artificial Sequence
  miRNA Sequence
ucugguaagagauuugggcaua

SEQ ID NO: 2054 - RNA, 22 nt, Artificial Sequence
  miRNA Sequence
uaugcccaaaucucuuaccaga

SEQ ID NO: 2055 - RNA, 22 nt, Artificial Sequence
  miRNA Sequence
aauguggacuggugugaccaaa

SEQ ID NO: 2056 - RNA, 22 nt, Artificial Sequence
  miRNA Sequence
uuuggucacaccaguccacauu

SEQ ID NO: 2057 - RNA, 17 nt, Artificial Sequence
  miRNA Sequence
ggggcugggcgcgcgcc

SEQ ID NO: 2058 - RNA, 17 nt, Artificial Sequence
  miRNA Sequence
ggcgcgcgcccagcccc

SEQ ID NO: 2059 - RNA, 21 nt, Artificial Sequence
  miRNA Sequence
agaaggccuuuccaucucugu

SEQ ID NO: 2060 - RNA, 21 nt, Artificial Sequence
  miRNA Sequence
acagagauggaaaggccuucu

SEQ ID NO: 2061 - RNA, 22 nt, Artificial Sequence
  miRNA Sequence
ccagacuguggcugaccagagg

SEQ ID NO: 2062 - RNA, 22 nt, Artificial Sequence
  miRNA Sequence
ccucuggucagccacagucugg

SEQ ID NO: 2063 - RNA, 21 nt, Artificial Sequence
  miRNA Sequence
aauguaaacaggcuuuuugcu

SEQ ID NO: 2064 - RNA, 21 nt, Artificial Sequence
  miRNA Sequence
agcaaaaagccuguuuacauu

SEQ ID NO: 2065 - RNA, 22 nt, Artificial Sequence
  miRNA Sequence
gaggaaacugaagcugagaggg

SEQ ID NO: 2066 - RNA, 22 nt, Artificial Sequence
  miRNA Sequence
cccucucagcuucaguuuccuc

SEQ ID NO: 2067 - RNA, 17 nt, Artificial Sequence
  miRNA Sequence
cuccgggacggcugggc

SEQ ID NO: 2068 - RNA, 17 nt, Artificial Sequence
  miRNA Sequence
gcccagccgucccggag

SEQ ID NO: 2069 - RNA, 22 nt, Artificial Sequence
  miRNA Sequence
ugggcuggcagggcaagugcug

SEQ ID NO: 2070 - RNA, 22 nt, Artificial Sequence
  miRNA Sequence
cagcacuugcccugccagccca

SEQ ID NO: 2071 - RNA, 17 nt, Artificial Sequence
  miRNA Sequence
aagacugagaggaggga

SEQ ID NO: 2072 - RNA, 17 nt, Artificial Sequence
  miRNA Sequence
ucccuccucucagucuu

SEQ ID NO: 2073 - RNA, 22 nt, Artificial Sequence
  miRNA Sequence
uggcaguguauuguuagcuggu

SEQ ID NO: 2074 - RNA, 22 nt, Artificial Sequence
  miRNA Sequence
accagcuaacaauacacugcca

SEQ ID NO: 2075 - RNA, 22 nt, Artificial Sequence
  miRNA Sequence
cagccacaacuacccugccacu

SEQ ID NO: 2076 - RNA, 22 nt, Artificial Sequence
  miRNA Sequence
aguggcaggguaguuguggcug

SEQ ID NO: 2077 - RNA, 22 nt, Artificial Sequence
  miRNA Sequence
aggcaguguauuguuagcuggc

SEQ ID NO: 2078 - RNA, 22 nt, Artificial Sequence
  miRNA Sequence
gccagcuaacaauacacugccu

SEQ ID NO: 2079 - RNA, 23 nt, Artificial Sequence
  miRNA Sequence
uugcuaguugcacuccucucugu

SEQ ID NO: 2080 - RNA, 23 nt, Artificial Sequence
  miRNA Sequence
acagagaggagugcaacuagcaa

SEQ ID NO: 2081 - RNA, 25 nt, Artificial Sequence
  miRNA Sequence
uaggcaguguauugcuagcggcugu

SEQ ID NO: 2082 - RNA, 25 nt, Artificial Sequence
  miRNA Sequence
acagccgcuagcaauacacugccua

SEQ ID NO: 2083 - RNA, 17 nt, Artificial Sequence
  miRNA Sequence
ugagguaguaguuucuu

SEQ ID NO: 2084 - RNA, 17 nt, Artificial Sequence
  miRNA Sequence
aagaaacuacuaccuca

SEQ ID NO: 2085 - RNA, 21 nt, Artificial Sequence
  miRNA Sequence
uaugugaccucggaugaauca

SEQ ID NO: 2086 - RNA, 21 nt, Artificial Sequence
  miRNA Sequence
ugauucauccgaggucacaua

SEQ ID NO: 2087 - RNA, 22 nt, Artificial Sequence
  miRNA Sequence
gcugaugaugauggugcugaag

SEQ ID NO: 2088 - RNA, 22 nt, Artificial Sequence
  miRNA Sequence
cuucagcaccaucaucaucagc

SEQ ID NO: 2089 - RNA, 22 nt, Artificial Sequence
  miRNA Sequence
uuuaagcaggaaauagaauuua

SEQ ID NO: 2090 - RNA, 22 nt, Artificial Sequence
  miRNA Sequence
uaaauucuauuuccugcuuaaa

SEQ ID NO: 2091 - RNA, 22 nt, Artificial Sequence
  miRNA Sequence
ugugacaauagagaugaacaug

SEQ ID NO: 2092 - RNA, 22 nt, Artificial Sequence
  miRNA Sequence
cauguucaucucuauugucaca

SEQ ID NO: 2093 - RNA, 18 nt, Artificial Sequence
  miRNA Sequence
aggcugggcugggacgga

SEQ ID NO: 2094 - RNA, 18 nt, Artificial Sequence
  miRNA Sequence
uccgucccagcccagccu

SEQ ID NO: 2095 - RNA, 20 nt, Artificial Sequence
  miRNA Sequence
aaauggguggucugaggcaa

SEQ ID NO: 2096 - RNA, 20 nt, Artificial Sequence
  miRNA Sequence
uugccucagaccacccauuu

SEQ ID NO: 2097 - RNA, 20 nt, Artificial Sequence
  miRNA Sequence
cuggguugggcugggcuggg

SEQ ID NO: 2098 - RNA, 20 nt, Artificial Sequence
  miRNA Sequence
cccagcccagcccaacccag

SEQ ID NO: 2099 - RNA, 17 nt, Artificial Sequence
  miRNA Sequence
gcggggcugggcgcgcg

SEQ ID NO: 2100 - RNA, 17 nt, Artificial Sequence
  miRNA Sequence
cgcgcgcccagccccgc

SEQ ID NO: 2101 - RNA, 22 nt, Artificial Sequence
  miRNA Sequence
acuaaaggauauagaagguuuu

SEQ ID NO: 2102 - RNA, 22 nt, Artificial Sequence
  miRNA Sequence
aaaaccuucuauauccuuuagu

SEQ ID NO: 2103 - RNA, 22 nt, Artificial Sequence
  miRNA Sequence
auuggggacauuuugcauucau

SEQ ID NO: 2104 - RNA, 22 nt, Artificial Sequence
  miRNA Sequence
augaaugcaaaauguccccaau

SEQ ID NO: 2105 - RNA, 22 nt, Artificial Sequence
  miRNA Sequence
uuuugcgauguguuccuaauau

SEQ ID NO: 2106 - RNA, 22 nt, Artificial Sequence
  miRNA Sequence
auauuaggaacacaucgcaaaa

SEQ ID NO: 2107 - RNA, 22 nt, Artificial Sequence
  miRNA Sequence
uugggaucauuuugcauccaua

SEQ ID NO: 2108 - RNA, 22 nt, Artificial Sequence
  miRNA Sequence
uauggaugcaaaaugaucccaa

SEQ ID NO: 2109 - RNA, 22 nt, Artificial Sequence
  miRNA Sequence
uuuugcaauauguuccugaaua

SEQ ID NO: 2110 - RNA, 22 nt, Artificial Sequence
  miRNA Sequence
uauucaggaacauauugcaaaa

SEQ ID NO: 2111 - RNA, 22 nt, Artificial Sequence
  miRNA Sequence
ugagggaguaggauguaugguu

SEQ ID NO: 2112 - RNA, 22 nt, Artificial Sequence
  miRNA Sequence
aaccauacauccuacucccuca

SEQ ID NO: 2113 - RNA, 22 nt, Artificial Sequence
  miRNA Sequence
gaagaacuguugcauuugcccu

SEQ ID NO: 2114 - RNA, 22 nt, Artificial Sequence
  miRNA Sequence
agggcaaaugcaacaguucuuc

SEQ ID NO: 2115 - RNA, 22 nt, Artificial Sequence
  miRNA Sequence
cagggccucacuguaucgccca

SEQ ID NO: 2116 - RNA, 22 nt, Artificial Sequence
  miRNA Sequence
ugggcgauacagugaggcccug

SEQ ID NO: 2117 - RNA, 22 nt, Artificial Sequence
  miRNA Sequence
agacugacggcuggaggcccau

SEQ ID NO: 2118 - RNA, 22 nt, Artificial Sequence
  miRNA Sequence
augggccuccagccgucagucu

SEQ ID NO: 2119 - RNA, 18 nt, Artificial Sequence
  miRNA Sequence
acaggcaggauuggggaa

SEQ ID NO: 2120 - RNA, 18 nt, Artificial Sequence
  miRNA Sequence
uuccccaauccugccugu

SEQ ID NO: 2121 - RNA, 22 nt, Artificial Sequence
  miRNA Sequence
aggacuggacucccggcagccc

SEQ ID NO: 2122 - RNA, 22 nt, Artificial Sequence
  miRNA Sequence
gggcugccgggaguccaguccu

SEQ ID NO: 2123 - RNA, 17 nt, Artificial Sequence
  miRNA Sequence
gggagaagggucggggc

SEQ ID NO: 2124 - RNA, 17 nt, Artificial Sequence
  miRNA Sequence
gccccgacccuucuccc

SEQ ID NO: 2125 - RNA, 25 nt, Artificial Sequence
  miRNA Sequence
aaauaugaugaaacucacagcugag

SEQ ID NO: 2126 - RNA, 25 nt, Artificial Sequence
  miRNA Sequence
cucagcugugaguuucaucauauuu

SEQ ID NO: 2127 - RNA, 26 nt, Artificial Sequence
  miRNA Sequence
gcucagggaugauaacugugcugaga

SEQ ID NO: 2128 - RNA, 26 nt, Artificial Sequence
  miRNA Sequence
ucucagcacaguuaucaucccugagc

SEQ ID NO: 2129 - RNA, 18 nt, Artificial Sequence
  miRNA Sequence
cagcagugcgcagggcug

SEQ ID NO: 2130 - RNA, 18 nt, Artificial Sequence
  miRNA Sequence
cagcccugcgcacugcug

SEQ ID NO: 2131 - RNA, 22 nt, Artificial Sequence
  miRNA Sequence
aaaccguuaccauuacugaguu

SEQ ID NO: 2132 - RNA, 22 nt, Artificial Sequence
  miRNA Sequence
aacucaguaaugguaacgguuu

SEQ ID NO: 2133 - RNA, 22 nt, Artificial Sequence
  miRNA Sequence
uagcaagagaaccauuaccauu

SEQ ID NO: 2134 - RNA, 22 nt, Artificial Sequence
  miRNA Sequence
aaugguaaugguucucuugcua

SEQ ID NO: 2135 - RNA, 22 nt, Artificial Sequence
  miRNA Sequence
cucaucugcaaagaaguaagug

SEQ ID NO: 2136 - RNA, 22 nt, Artificial Sequence
  miRNA Sequence
cacuuacuucuuugcagaugag

SEQ ID NO: 2137 - RNA, 22 nt, Artificial Sequence
  miRNA Sequence
aacuguuugcagaggaaacuga

SEQ ID NO: 2138 - RNA, 22 nt, Artificial Sequence
  miRNA Sequence
ucaguuuccucugcaaacaguu

SEQ ID NO: 2139 - RNA, 22 nt, Artificial Sequence
  miRNA Sequence
uuggacagaaaacacgcaggaa

SEQ ID NO: 2140 - RNA, 22 nt, Artificial Sequence
  miRNA Sequence
uuccugcguguuuucuguccaa

SEQ ID NO: 2141 - RNA, 20 nt, Artificial Sequence
  miRNA Sequence
ccugcguguuuucuguccaa

SEQ ID NO: 2142 - RNA, 20 nt, Artificial Sequence
  miRNA Sequence
uuggacagaaaacacgcagg

SEQ ID NO: 2143 - RNA, 22 nt, Artificial Sequence
  miRNA Sequence
uuuggacagaaaacacgcaggu

SEQ ID NO: 2144 - RNA, 22 nt, Artificial Sequence
  miRNA Sequence
accugcguguuuucuguccaaa

SEQ ID NO: 2145 - RNA, 20 nt, Artificial Sequence
  miRNA Sequence
ccugcguguuuucuguccaa

SEQ ID NO: 2146 - RNA, 20 nt, Artificial Sequence
  miRNA Sequence
uuggacagaaaacacgcagg

SEQ ID NO: 2147 - RNA, 22 nt, Artificial Sequence
  miRNA Sequence
gcuaaggaaguccugugcucag

SEQ ID NO: 2148 - RNA, 22 nt, Artificial Sequence
  miRNA Sequence
cugagcacaggacuuccuuagc

SEQ ID NO: 2149 - RNA, 21 nt, Artificial Sequence
  miRNA Sequence
ugacucugccuguaggccggu

SEQ ID NO: 2150 - RNA, 21 nt, Artificial Sequence
  miRNA Sequence
accggccuacaggcagaguca

SEQ ID NO: 2151 - RNA, 21 nt, Artificial Sequence
  miRNA Sequence
gaccgagagggccucggcugu

SEQ ID NO: 2152 - RNA, 21 nt, Artificial Sequence
  miRNA Sequence
acagccgaggcccucucgguc

SEQ ID NO: 2153 - RNA, 22 nt, Artificial Sequence
  miRNA Sequence
ugagacaggcuuaugcugcuau

SEQ ID NO: 2154 - RNA, 22 nt, Artificial Sequence
  miRNA Sequence
auagcagcauaagccugucuca

SEQ ID NO: 2155 - RNA, 22 nt, Artificial Sequence
  miRNA Sequence
auagcagcaugaaccugucuca

SEQ ID NO: 2156 - RNA, 22 nt, Artificial Sequence
  miRNA Sequence
ugagacagguucaugcugcuau

SEQ ID NO: 2157 - RNA, 20 nt, Artificial Sequence
  miRNA Sequence
gagacagguucaugcugcua

SEQ ID NO: 2158 - RNA, 20 nt, Artificial Sequence
  miRNA Sequence
uagcagcaugaaccugucuc

SEQ ID NO: 2159 - RNA, 21 nt, Artificial Sequence
  miRNA Sequence
auagcagcauaagccugucuc

SEQ ID NO: 2160 - RNA, 21 nt, Artificial Sequence
  miRNA Sequence
gagacaggcuuaugcugcuau

SEQ ID NO: 2161 - RNA, 21 nt, Artificial Sequence
  miRNA Sequence
ggggggaugugcaugcugguu

SEQ ID NO: 2162 - RNA, 21 nt, Artificial Sequence
  miRNA Sequence
aaccagcaugcacaucccccc

SEQ ID NO: 2163 - RNA, 22 nt, Artificial Sequence
  miRNA Sequence
gcugacagcagggcuggccgcu

SEQ ID NO: 2164 - RNA, 22 nt, Artificial Sequence
  miRNA Sequence
agcggccagcccugcugucagc

SEQ ID NO: 2165 - RNA, 22 nt, Artificial Sequence
  miRNA Sequence
uggucugcaaagagaugacugu

SEQ ID NO: 2166 - RNA, 22 nt, Artificial Sequence
  miRNA Sequence
acagucaucucuuugcagacca

SEQ ID NO: 2167 - RNA, 22 nt, Artificial Sequence
  miRNA Sequence
ucauuauauguaugaucuggac

SEQ ID NO: 2168 - RNA, 22 nt, Artificial Sequence
  miRNA Sequence
guccagaucauacauauaauga

SEQ ID NO: 2169 - RNA, 21 nt, Artificial Sequence
  miRNA Sequence
auuggacugcugauggcccgu

SEQ ID NO: 2170 - RNA, 21 nt, Artificial Sequence
  miRNA Sequence
acgggccaucagcaguccaau

SEQ ID NO: 2171 - RNA, 22 nt, Artificial Sequence
  miRNA Sequence
aggccaucagcaguccaaugaa

SEQ ID NO: 2172 - RNA, 22 nt, Artificial Sequence
  miRNA Sequence
uucauuggacugcugauggccu

SEQ ID NO: 2173 - RNA, 18 nt, Artificial Sequence
  miRNA Sequence
cccagcaggacgggagcg

SEQ ID NO: 2174 - DNA, 18 bp, Artificial Sequence
  miRNA Sequence
cgctcccgtcctgctggg

SEQ ID NO: 2175 - RNA, 17 nt, Artificial Sequence
  miRNA Sequence
auggagaaggcuucuga

SEQ ID NO: 2176 - RNA, 17 nt, Artificial Sequence
  miRNA Sequence
ucagaagccuucuccau

SEQ ID NO: 2177 - RNA, 17 nt, Artificial Sequence
  miRNA Sequence
ccccggggagcccggcg

SEQ ID NO: 2178 - DNA, 17 bp, Artificial Sequence
  miRNA Sequence
cgccgggctccccgggg

SEQ ID NO: 2179 - RNA, 22 nt, Artificial Sequence
  miRNA Sequence
uggaaggagguugccggacgcu

SEQ ID NO: 2180 - RNA, 22 nt, Artificial Sequence
  miRNA Sequence
agcguccggcaaccuccuucca

SEQ ID NO: 2181 - RNA, 17 nt, Artificial Sequence
  miRNA Sequence
ggauggaggaggggucu

SEQ ID NO: 2182 - RNA, 17 nt, Artificial Sequence
  miRNA Sequence
agaccccuccuccaucc

SEQ ID NO: 2183 - RNA, 17 nt, Artificial Sequence
  miRNA Sequence
guggaccuggcugggac

SEQ ID NO: 2184 - RNA, 17 nt, Artificial Sequence
  miRNA Sequence
gucccagccagguccac

SEQ ID NO: 2185 - RNA, 21 nt, Artificial Sequence
  miRNA Sequence
ucgugcauauaucuaccacau

SEQ ID NO: 2186 - RNA, 21 nt, Artificial Sequence
  miRNA Sequence
augugguagauauaugcacga

SEQ ID NO: 2187 - RNA, 21 nt, Artificial Sequence
  miRNA Sequence
ugugguagauauaugcacgau

SEQ ID NO: 2188 - RNA, 21 nt, Artificial Sequence
  miRNA Sequence
aucgugcauauaucuaccaca

SEQ ID NO: 2189 - RNA, 22 nt, Artificial Sequence
  miRNA Sequence
ugagccgagcugagcuuagcug

SEQ ID NO: 2190 - RNA, 22 nt, Artificial Sequence
  miRNA Sequence
cagcuaagcucagcucggcuca

SEQ ID NO: 2191 - RNA, 22 nt, Artificial Sequence
  miRNA Sequence
gagcuuggaugagcugggcuga

SEQ ID NO: 2192 - RNA, 22 nt, Artificial Sequence
  miRNA Sequence
ucagcccagcucauccaagcuc

SEQ ID NO: 2193 - RNA, 22 nt, Artificial Sequence
  miRNA Sequence
gcugaacugggcugagcugggc

SEQ ID NO: 2194 - RNA, 22 nt, Artificial Sequence
  miRNA Sequence
gcccagcucagcccaguucagc

SEQ ID NO: 2195 - RNA, 23 nt, Artificial Sequence
  miRNA Sequence
uagugcaauauugcuuauagggu

SEQ ID NO: 2196 - RNA, 23 nt, Artificial Sequence
  miRNA Sequence
acccuauaagcaauauugcacua

SEQ ID NO: 2197 - RNA, 22 nt, Artificial Sequence
  miRNA Sequence
acccuaucaauauugucucugc

SEQ ID NO: 2198 - RNA, 22 nt, Artificial Sequence
  miRNA Sequence
gcagagacaauauugauagggu

SEQ ID NO: 2199 - RNA, 21 nt, Artificial Sequence
  miRNA Sequence
uuaguccugccuguagguuua

SEQ ID NO: 2200 - RNA, 21 nt, Artificial Sequence
  miRNA Sequence
uaaaccuacaggcaggacuaa

SEQ ID NO: 2201 - RNA, 21 nt, Artificial Sequence
  miRNA Sequence
gcaguccaugggcauauacac

SEQ ID NO: 2202 - RNA, 21 nt, Artificial Sequence
  miRNA Sequence
guguauaugcccauggacugc

SEQ ID NO: 2203 - RNA, 22 nt, Artificial Sequence
  miRNA Sequence
uaugugccuuuggacuacaucg

SEQ ID NO: 2204 - RNA, 22 nt, Artificial Sequence
  miRNA Sequence
cgauguaguccaaaggcacaua

SEQ ID NO: 2205 - RNA, 22 nt, Artificial Sequence
  miRNA Sequence
ugccgcccucucgcugcucuag

SEQ ID NO: 2206 - RNA, 22 nt, Artificial Sequence
  miRNA Sequence
cuagagcagcgagagggcggca

SEQ ID NO: 2207 - RNA, 22 nt, Artificial Sequence
  miRNA Sequence
aggagcuagccaggcauaugca

SEQ ID NO: 2208 - RNA, 22 nt, Artificial Sequence
  miRNA Sequence
ugcauaugccuggcuagcuccu

SEQ ID NO: 2209 - RNA, 20 nt, Artificial Sequence
  miRNA Sequence
auaugccuggcuagcuccuc

SEQ ID NO: 2210 - RNA, 20 nt, Artificial Sequence
  miRNA Sequence
gaggagcuagccaggcauau

SEQ ID NO: 2211 - RNA, 19 nt, Artificial Sequence
  miRNA Sequence
cggcgcgaccggcccgggg

SEQ ID NO: 2212 - DNA, 19 bp, Artificial Sequence
  miRNA Sequence
ccccgggccggtcgcgccg

SEQ ID NO: 2213 - RNA, 21 nt, Artificial Sequence
  miRNA Sequence
ucuugaagucagaacccgcaa

SEQ ID NO: 2214 - RNA, 21 nt, Artificial Sequence
  miRNA Sequence
uugcggguucugacuucaaga

SEQ ID NO: 2215 - RNA, 22 nt, Artificial Sequence
  miRNA Sequence
aacucguguucaaagccuuuag

SEQ ID NO: 2216 - RNA, 22 nt, Artificial Sequence
  miRNA Sequence
cuaaaggcuuugaacacgaguu

SEQ ID NO: 2217 - RNA, 22 nt, Artificial Sequence
  miRNA Sequence
uacuaacugcagauucaaguga

SEQ ID NO: 2218 - RNA, 22 nt, Artificial Sequence
  miRNA Sequence
ucacuugaaucugcaguuagua

SEQ ID NO: 2219 - RNA, 23 nt, Artificial Sequence
  miRNA Sequence
ccuggacaccgcucagccggccg

SEQ ID NO: 2220 - RNA, 23 nt, Artificial Sequence
  miRNA Sequence
cggccggcugagcgguguccagg

SEQ ID NO: 2221 - RNA, 21 nt, Artificial Sequence
  miRNA Sequence
acucggcugcgguggacaagu

SEQ ID NO: 2222 - RNA, 21 nt, Artificial Sequence
  miRNA Sequence
acuuguccaccgcagccgagu

SEQ ID NO: 2223 - RNA, 20 nt, Artificial Sequence
  miRNA Sequence
ucacucucaccuugcuuugc

SEQ ID NO: 2224 - RNA, 20 nt, Artificial Sequence
  miRNA Sequence
gcaaagcaaggugagaguga

SEQ ID NO: 2225 - RNA, 22 nt, Artificial Sequence
  miRNA Sequence
uugcuaaguaggcugagauuga

SEQ ID NO: 2226 - RNA, 22 nt, Artificial Sequence
  miRNA Sequence
ucaaucucagccuacuuagcaa

SEQ ID NO: 2227 - RNA, 22 nt, Artificial Sequence
  miRNA Sequence
cacccccuguuuccuggcccac

SEQ ID NO: 2228 - RNA, 22 nt, Artificial Sequence
  miRNA Sequence
gugggccaggaaacagggggug

SEQ ID NO: 2229 - RNA, 23 nt, Artificial Sequence
  miRNA Sequence
ugggccagggagcagcugguggg

SEQ ID NO: 2230 - RNA, 23 nt, Artificial Sequence
  miRNA Sequence
cccaccagcugcucccuggccca

SEQ ID NO: 2231 - RNA, 24 nt, Artificial Sequence
  miRNA Sequence
ugcccaugccauacuuuugccuca

SEQ ID NO: 2232 - RNA, 24 nt, Artificial Sequence
  miRNA Sequence
ugaggcaaaaguauggcaugggca

SEQ ID NO: 2233 - RNA, 22 nt, Artificial Sequence
  miRNA Sequence
auggcaucguccccugguggcu

SEQ ID NO: 2234 - RNA, 22 nt, Artificial Sequence
  miRNA Sequence
agccaccaggggacgaugccau

SEQ ID NO: 2235 - RNA, 22 nt, Artificial Sequence
  miRNA Sequence
gacacaugaccauaaaugcuaa

SEQ ID NO: 2236 - RNA, 22 nt, Artificial Sequence
  miRNA Sequence
uuagcauuuauggucauguguc

SEQ ID NO: 2237 - RNA, 23 nt, Artificial Sequence
  miRNA Sequence
uggagagagaaaagagacagaag

SEQ ID NO: 2238 - RNA, 23 nt, Artificial Sequence
  miRNA Sequence
cuucugucucuuuucucucucca

SEQ ID NO: 2239 - RNA, 22 nt, Artificial Sequence
  miRNA Sequence
agacaguaguucuugccugguu

SEQ ID NO: 2240 - RNA, 22 nt, Artificial Sequence
  miRNA Sequence
aaccaggcaagaacuacugucu

SEQ ID NO: 2241 - RNA, 19 nt, Artificial Sequence
  miRNA Sequence
accaggcaagaaauauugu

SEQ ID NO: 2242 - RNA, 19 nt, Artificial Sequence
  miRNA Sequence
acaauauuucuugccuggu

SEQ ID NO: 2243 - RNA, 21 nt, Artificial Sequence
  miRNA Sequence
auugucccucucccuucccag

SEQ ID NO: 2244 - RNA, 21 nt, Artificial Sequence
  miRNA Sequence
cugggaagggagagggacaau

SEQ ID NO: 2245 - RNA, 22 nt, Artificial Sequence
  miRNA Sequence
acugggaagaggagcugaggga

SEQ ID NO: 2246 - RNA, 22 nt, Artificial Sequence
  miRNA Sequence
ucccucagcuccucuucccagu

SEQ ID NO: 2247 - RNA, 23 nt, Artificial Sequence
  miRNA Sequence
gaagauggugcugugcugaggaa

SEQ ID NO: 2248 - RNA, 23 nt, Artificial Sequence
  miRNA Sequence
uuccucagcacagcaccaucuuc

SEQ ID NO: 2249 - RNA, 20 nt, Artificial Sequence
  miRNA Sequence
ugugggacugcaaaugggag

SEQ ID NO: 2250 - RNA, 20 nt, Artificial Sequence
  miRNA Sequence
cucccauuugcagucccaca

SEQ ID NO: 2251 - RNA, 21 nt, Artificial Sequence
  miRNA Sequence
ucugaggccugccucucccca

SEQ ID NO: 2252 - RNA, 21 nt, Artificial Sequence
  miRNA Sequence
uggggagaggcaggccucaga

SEQ ID NO: 2253 - RNA, 24 nt, Artificial Sequence
  miRNA Sequence
ugggcgaggggugggcucucagag

SEQ ID NO: 2254 - RNA, 24 nt, Artificial Sequence
  miRNA Sequence
cucugagagcccaccccucgccca

SEQ ID NO: 2255 - RNA, 21 nt, Artificial Sequence
  miRNA Sequence
agguagaaugaggccugacau

SEQ ID NO: 2256 - RNA, 21 nt, Artificial Sequence
  miRNA Sequence
augucaggccucauucuaccu

SEQ ID NO: 2257 - RNA, 19 nt, Artificial Sequence
  miRNA Sequence
ucaggccucuuucuaccuu

SEQ ID NO: 2258 - RNA, 19 nt, Artificial Sequence
  miRNA Sequence
aagguagaaagaggccuga

SEQ ID NO: 2259 - RNA, 20 nt, Artificial Sequence
  miRNA Sequence
cggggugggugaggucgggc

SEQ ID NO: 2260 - RNA, 20 nt, Artificial Sequence
  miRNA Sequence
gcccgaccucacccaccccg

SEQ ID NO: 2261 - RNA, 22 nt, Artificial Sequence
  miRNA Sequence
guucuguuaacccauccccuca

SEQ ID NO: 2262 - RNA, 22 nt, Artificial Sequence
  miRNA Sequence
ugaggggauggguuaacagaac

SEQ ID NO: 2263 - RNA, 22 nt, Artificial Sequence
  miRNA Sequence
aggggacugguuaauagaacua

SEQ ID NO: 2264 - RNA, 22 nt, Artificial Sequence
  miRNA Sequence
uaguucuauuaaccaguccccu

SEQ ID NO: 2265 - RNA, 23 nt, Artificial Sequence
  miRNA Sequence
uggaguuaaggguugcuuggaga

SEQ ID NO: 2266 - RNA, 23 nt, Artificial Sequence
  miRNA Sequence
ucuccaagcaacccuuaacucca

SEQ ID NO: 2267 - RNA, 22 nt, Artificial Sequence
  miRNA Sequence
ucucugagcaaggcuuaacacc

SEQ ID NO: 2268 - RNA, 22 nt, Artificial Sequence
  miRNA Sequence
gguguuaagccuugcucagaga

SEQ ID NO: 2269 - RNA, 22 nt, Artificial Sequence
  miRNA Sequence
ugugggaucuggaggcaucugg

SEQ ID NO: 2270 - RNA, 22 nt, Artificial Sequence
  miRNA Sequence
ccagaugccuccagaucccaca

SEQ ID NO: 2271 - RNA, 21 nt, Artificial Sequence
  miRNA Sequence
acccucgucagguccccgggg

SEQ ID NO: 2272 - RNA, 21 nt, Artificial Sequence
  miRNA Sequence
ccccggggaccugacgagggu

SEQ ID NO: 2273 - RNA, 22 nt, Artificial Sequence
  miRNA Sequence
caccggggauggcagagggucg

SEQ ID NO: 2274 - RNA, 22 nt, Artificial Sequence
  miRNA Sequence
cgacccucugccauccccggug

SEQ ID NO: 2275 - RNA, 23 nt, Artificial Sequence
  miRNA Sequence
ugggcugagggcaggaggccugu

SEQ ID NO: 2276 - RNA, 23 nt, Artificial Sequence
  miRNA Sequence
acaggccuccugcccucagccca

SEQ ID NO: 2277 - RNA, 23 nt, Artificial Sequence
  miRNA Sequence
aauguggaaguggucugaggcau

SEQ ID NO: 2278 - RNA, 23 nt, Artificial Sequence
  miRNA Sequence
augccucagaccacuuccacauu

SEQ ID NO: 2279 - RNA, 23 nt, Artificial Sequence
  miRNA Sequence
gugaguguggauccuggaggaau

SEQ ID NO: 2280 - RNA, 23 nt, Artificial Sequence
  miRNA Sequence
auuccuccaggauccacacucac

SEQ ID NO: 2281 - RNA, 22 nt, Artificial Sequence
  miRNA Sequence
uuucuucuuagacauggcaacg

SEQ ID NO: 2282 - RNA, 22 nt, Artificial Sequence
  miRNA Sequence
cguugccaugucuaagaagaaa

SEQ ID NO: 2283 - RNA, 22 nt, Artificial Sequence
  miRNA Sequence
cugccaugucuaagaagaaaac

SEQ ID NO: 2284 - RNA, 22 nt, Artificial Sequence
  miRNA Sequence
guuuucuucuuagacauggcag

SEQ ID NO: 2285 - RNA, 22 nt, Artificial Sequence
  miRNA Sequence
uuucuucuuagacauggcagcu

SEQ ID NO: 2286 - RNA, 22 nt, Artificial Sequence
  miRNA Sequence
agcugccaugucuaagaagaaa

SEQ ID NO: 2287 - RNA, 19 nt, Artificial Sequence
  miRNA Sequence
uugccaugucuaagaagaa

SEQ ID NO: 2288 - RNA, 19 nt, Artificial Sequence
  miRNA Sequence
uucuucuuagacauggcaa

SEQ ID NO: 2289 - RNA, 23 nt, Artificial Sequence
  miRNA Sequence
auacacauacacgcaacacacau

SEQ ID NO: 2290 - RNA, 23 nt, Artificial Sequence
  miRNA Sequence
auguguguugcguguauguguau

SEQ ID NO: 2291 - RNA, 23 nt, Artificial Sequence
  miRNA Sequence
ugcagcucugguggaaaauggag

SEQ ID NO: 2292 - RNA, 23 nt, Artificial Sequence
  miRNA Sequence
cuccauuuuccaccagagcugca

SEQ ID NO: 2293 - RNA, 22 nt, Artificial Sequence
  miRNA Sequence
caggauccacagagcuagucca

SEQ ID NO: 2294 - RNA, 22 nt, Artificial Sequence
  miRNA Sequence
uggacuagcucuguggauccug

SEQ ID NO: 2295 - RNA, 22 nt, Artificial Sequence
  miRNA Sequence
aacuagcucuguggauccugac

SEQ ID NO: 2296 - RNA, 22 nt, Artificial Sequence
  miRNA Sequence
gucaggauccacagagcuaguu

SEQ ID NO: 2297 - RNA, 22 nt, Artificial Sequence
  miRNA Sequence
aaagauagacaauuggcuaaau

SEQ ID NO: 2298 - RNA, 22 nt, Artificial Sequence
  miRNA Sequence
auuuagccaauugucuaucuuu

SEQ ID NO: 2299 - RNA, 22 nt, Artificial Sequence
  miRNA Sequence
uuagccaauuguccaucuuuag

SEQ ID NO: 2300 - RNA, 22 nt, Artificial Sequence
  miRNA Sequence
cuaaagauggacaauuggcuaa

SEQ ID NO: 2301 - RNA, 22 nt, Artificial Sequence
  miRNA Sequence
aaagauggacaauuggcuaaau

SEQ ID NO: 2302 - RNA, 22 nt, Artificial Sequence
  miRNA Sequence
auuuagccaauuguccaucuuu

SEQ ID NO: 2303 - RNA, 24 nt, Artificial Sequence
  miRNA Sequence
agcugagcuccauggacgugcagu

SEQ ID NO: 2304 - RNA, 24 nt, Artificial Sequence
  miRNA Sequence
acugcacguccauggagcucagcu

SEQ ID NO: 2305 - RNA, 22 nt, Artificial Sequence
  miRNA Sequence
cuuccggucugugagccccguc

SEQ ID NO: 2306 - RNA, 22 nt, Artificial Sequence
  miRNA Sequence
gacggggcucacagaccggaag

SEQ ID NO: 2307 - RNA, 22 nt, Artificial Sequence
  miRNA Sequence
uggggugcccacuccgcaaguu

SEQ ID NO: 2308 - RNA, 22 nt, Artificial Sequence
  miRNA Sequence
aacuugcggagugggcacccca

SEQ ID NO: 2309 - RNA, 26 nt, Artificial Sequence
  miRNA Sequence
cucggccgcggcgcguagcccccgcc

SEQ ID NO: 2310 - RNA, 26 nt, Artificial Sequence
  miRNA Sequence
ggcgggggcuacgcgccgcggccgag

SEQ ID NO: 2311 - RNA, 23 nt, Artificial Sequence
  miRNA Sequence
cugggggacgcgugagcgcgagc

SEQ ID NO: 2312 - RNA, 23 nt, Artificial Sequence
  miRNA Sequence
gcucgcgcucacgcgucccccag

SEQ ID NO: 2313 - RNA, 21 nt, Artificial Sequence
  miRNA Sequence
cauacaaucugacauguauuu

SEQ ID NO: 2314 - RNA, 21 nt, Artificial Sequence
  miRNA Sequence
aaauacaugucagauuguaug

SEQ ID NO: 2315 - RNA, 21 nt, Artificial Sequence
  miRNA Sequence
auacaugucagauuguaugcc

SEQ ID NO: 2316 - RNA, 21 nt, Artificial Sequence
  miRNA Sequence
ggcauacaaucugacauguau

SEQ ID NO: 2317 - RNA, 23 nt, Artificial Sequence
  miRNA Sequence
uugcaugucagauuguaauuccc

SEQ ID NO: 2318 - RNA, 23 nt, Artificial Sequence
  miRNA Sequence
gggaauuacaaucugacaugcaa

SEQ ID NO: 2319 - RNA, 21 nt, Artificial Sequence
  miRNA Sequence
ucccuccuucuguccccacag

SEQ ID NO: 2320 - RNA, 21 nt, Artificial Sequence
  miRNA Sequence
cuguggggacagaaggaggga

SEQ ID NO: 2321 - RNA, 22 nt, Artificial Sequence
  miRNA Sequence
acuggggagcagaaggagaacc

SEQ ID NO: 2322 - RNA, 22 nt, Artificial Sequence
  miRNA Sequence
gguucuccuucugcuccccagu

SEQ ID NO: 2323 - RNA, 23 nt, Artificial Sequence
  miRNA Sequence
gaaaauccuuuuuguuuuuccag

SEQ ID NO: 2324 - RNA, 23 nt, Artificial Sequence
  miRNA Sequence
cuggaaaaacaaaaaggauuuuc

SEQ ID NO: 2325 - RNA, 23 nt, Artificial Sequence
  miRNA Sequence
agggaaaaaaaaaaggauuuguc

SEQ ID NO: 2326 - RNA, 23 nt, Artificial Sequence
  miRNA Sequence
gacaaauccuuuuuuuuuucccu

SEQ ID NO: 2327 - RNA, 22 nt, Artificial Sequence
  miRNA Sequence
uguguccgggaaguggaggagg

SEQ ID NO: 2328 - RNA, 22 nt, Artificial Sequence
  miRNA Sequence
ccuccuccacuucccggacaca

SEQ ID NO: 2329 - RNA, 22 nt, Artificial Sequence
  miRNA Sequence
ugaaguuacaucauggucgcuu

SEQ ID NO: 2330 - RNA, 22 nt, Artificial Sequence
  miRNA Sequence
aagcgaccaugauguaacuuca

SEQ ID NO: 2331 - RNA, 22 nt, Artificial Sequence
  miRNA Sequence
aagcgaccaugauguaacuuca

SEQ ID NO: 2332 - RNA, 22 nt, Artificial Sequence
  miRNA Sequence
ugaaguuacaucauggucgcuu

SEQ ID NO: 2333 - RNA, 21 nt, Artificial Sequence
  miRNA Sequence
uuagugcauagucuuuggucu

SEQ ID NO: 2334 - RNA, 21 nt, Artificial Sequence
  miRNA Sequence
agaccaaagacuaugcacuaa

SEQ ID NO: 2335 - RNA, 22 nt, Artificial Sequence
  miRNA Sequence
accgaagacugugcgcuaaucu

SEQ ID NO: 2336 - RNA, 22 nt, Artificial Sequence
  miRNA Sequence
agauuagcgcacagucuucggu

SEQ ID NO: 2337 - RNA, 21 nt, Artificial Sequence
  miRNA Sequence
uuacacagcuggacagaggca

SEQ ID NO: 2338 - RNA, 21 nt, Artificial Sequence
  miRNA Sequence
ugccucuguccagcuguguaa

SEQ ID NO: 2339 - RNA, 22 nt, Artificial Sequence
  miRNA Sequence
uccaggcaggagccggacugga

SEQ ID NO: 2340 - RNA, 22 nt, Artificial Sequence
  miRNA Sequence
uccaguccggcuccugccugga

SEQ ID NO: 2341 - RNA, 21 nt, Artificial Sequence
  miRNA Sequence
cugggcucgggacgcgcggcu

SEQ ID NO: 2342 - RNA, 21 nt, Artificial Sequence
  miRNA Sequence
agccgcgcgucccgagcccag

SEQ ID NO: 2343 - RNA, 22 nt, Artificial Sequence
  miRNA Sequence
ggggcugugauugaccagcagg

SEQ ID NO: 2344 - RNA, 22 nt, Artificial Sequence
  miRNA Sequence
ccugcuggucaaucacagcccc

SEQ ID NO: 2345 - RNA, 22 nt, Artificial Sequence
  miRNA Sequence
cacuguuucaccacuggcucuu

SEQ ID NO: 2346 - RNA, 22 nt, Artificial Sequence
  miRNA Sequence
aagagccaguggugaaacagug

SEQ ID NO: 2347 - RNA, 21 nt, Artificial Sequence
  miRNA Sequence
gagccaguggugagacaguga

SEQ ID NO: 2348 - RNA, 21 nt, Artificial Sequence
  miRNA Sequence
ucacugucucaccacuggcuc

SEQ ID NO: 2349 - RNA, 22 nt, Artificial Sequence
  miRNA Sequence
ucugugagaccaaagaacuacu

SEQ ID NO: 2350 - RNA, 22 nt, Artificial Sequence
  miRNA Sequence
aguaguucuuuggucucacaga

SEQ ID NO: 2351 - RNA, 22 nt, Artificial Sequence
  miRNA Sequence
uuguucuuuggucuuucagcca

SEQ ID NO: 2352 - RNA, 22 nt, Artificial Sequence
  miRNA Sequence
uggcugaaagaccaaagaacaa

SEQ ID NO: 2353 - RNA, 22 nt, Artificial Sequence
  miRNA Sequence
aagguauuguucagacuuauga

SEQ ID NO: 2354 - RNA, 22 nt, Artificial Sequence
  miRNA Sequence
ucauaagucugaacaauaccuu

SEQ ID NO: 2355 - RNA, 22 nt, Artificial Sequence
  miRNA Sequence
ucugugauagagauucuuugcu

SEQ ID NO: 2356 - RNA, 22 nt, Artificial Sequence
  miRNA Sequence
agcaaagaaucucuaucacaga

SEQ ID NO: 2357 - RNA, 21 nt, Artificial Sequence
  miRNA Sequence
ucugaauuguaagaguuguua

SEQ ID NO: 2358 - RNA, 21 nt, Artificial Sequence
  miRNA Sequence
uaacaacucuuacaauucaga

SEQ ID NO: 2359 - RNA, 23 nt, Artificial Sequence
  miRNA Sequence
agaacucuugcagucuuagaugu

SEQ ID NO: 2360 - RNA, 23 nt, Artificial Sequence
  miRNA Sequence
acaucuaagacugcaagaguucu

SEQ ID NO: 2361 - RNA, 22 nt, Artificial Sequence
  miRNA Sequence
aacgggaaugcaggcuguaucu

SEQ ID NO: 2362 - RNA, 22 nt, Artificial Sequence
  miRNA Sequence
agauacagccugcauucccguu

SEQ ID NO: 2363 - RNA, 23 nt, Artificial Sequence
  miRNA Sequence
ucugaguuccuggagccuggucu

SEQ ID NO: 2364 - RNA, 23 nt, Artificial Sequence
  miRNA Sequence
agaccaggcuccaggaacucaga

SEQ ID NO: 2365 - RNA, 23 nt, Artificial Sequence
  miRNA Sequence
uggagauccagugcucgcccgau

SEQ ID NO: 2366 - RNA, 23 nt, Artificial Sequence
  miRNA Sequence
aucgggcgagcacuggaucucca

SEQ ID NO: 2367 - RNA, 22 nt, Artificial Sequence
  miRNA Sequence
uguugcaagucgguggagacgu

SEQ ID NO: 2368 - RNA, 22 nt, Artificial Sequence
  miRNA Sequence
acgucuccaccgacuugcaaca

SEQ ID NO: 2369 - RNA, 22 nt, Artificial Sequence
  miRNA Sequence
cucucuacugacuugcaacaua

SEQ ID NO: 2370 - RNA, 22 nt, Artificial Sequence
  miRNA Sequence
uauguugcaagucaguagagag

SEQ ID NO: 2371 - RNA, 22 nt, Artificial Sequence
  miRNA Sequence
ucucccuuccugcccuggcuag

SEQ ID NO: 2372 - RNA, 22 nt, Artificial Sequence
  miRNA Sequence
cuagccagggcaggaagggaga

SEQ ID NO: 2373 - RNA, 26 nt, Artificial Sequence
  miRNA Sequence
cccagggcuuggaguggggcaagguu

SEQ ID NO: 2374 - RNA, 26 nt, Artificial Sequence
  miRNA Sequence
aaccuugccccacuccaagcccuggg

SEQ ID NO: 2375 - RNA, 23 nt, Artificial Sequence
  miRNA Sequence
uaucugcugggcuuucugguguu

SEQ ID NO: 2376 - RNA, 23 nt, Artificial Sequence
  miRNA Sequence
aacaccagaaagcccagcagaua

SEQ ID NO: 2377 - RNA, 21 nt, Artificial Sequence
  miRNA Sequence
uggcuguuggagggggcaggc

SEQ ID NO: 2378 - RNA, 21 nt, Artificial Sequence
  miRNA Sequence
gccugcccccuccaacagcca

SEQ ID NO: 2379 - RNA, 22 nt, Artificial Sequence
  miRNA Sequence
cagcccuccucccgcacccaaa

SEQ ID NO: 2380 - RNA, 22 nt, Artificial Sequence
  miRNA Sequence
uuugggugcgggaggagggcug

SEQ ID NO: 2381 - RNA, 22 nt, Artificial Sequence
  miRNA Sequence
uaggggcagcagaggaccuggg

SEQ ID NO: 2382 - RNA, 22 nt, Artificial Sequence
  miRNA Sequence
cccagguccucugcugccccua

SEQ ID NO: 2383 - RNA, 22 nt, Artificial Sequence
  miRNA Sequence
uugaggagacauggugggggcc

SEQ ID NO: 2384 - RNA, 22 nt, Artificial Sequence
  miRNA Sequence
ggcccccaccaugucuccucaa

SEQ ID NO: 2385 - RNA, 21 nt, Artificial Sequence
  miRNA Sequence
gcagcccagcugaggccucug

SEQ ID NO: 2386 - RNA, 21 nt, Artificial Sequence
  miRNA Sequence
cagaggccucagcugggcugc

SEQ ID NO: 2387 - RNA, 22 nt, Artificial Sequence
  miRNA Sequence
gagcaggcgaggcugggcugaa

SEQ ID NO: 2388 - RNA, 22 nt, Artificial Sequence
  miRNA Sequence
uucagcccagccucgccugcuc

SEQ ID NO: 2389 - RNA, 23 nt, Artificial Sequence
  miRNA Sequence
ccagccacggacugagagugcau

SEQ ID NO: 2390 - RNA, 23 nt, Artificial Sequence
  miRNA Sequence
augcacucucaguccguggcugg

SEQ ID NO: 2391 - RNA, 23 nt, Artificial Sequence
  miRNA Sequence
guccuccaggccaugagcugcgg

SEQ ID NO: 2392 - RNA, 23 nt, Artificial Sequence
  miRNA Sequence
ccgcagcucauggccuggaggac

SEQ ID NO: 2393 - RNA, 22 nt, Artificial Sequence
  miRNA Sequence
ucaggcaguguggguaucagau

SEQ ID NO: 2394 - RNA, 22 nt, Artificial Sequence
  miRNA Sequence
aucugauacccacacugccuga

SEQ ID NO: 2395 - RNA, 23 nt, Artificial Sequence
  miRNA Sequence
ugagaguggaauucacaguauuu

SEQ ID NO: 2396 - RNA, 23 nt, Artificial Sequence
  miRNA Sequence
aaauacugugaauuccacucuca

SEQ ID NO: 2397 - RNA, 23 nt, Artificial Sequence
  miRNA Sequence
auacugugaauuucacugucaca

SEQ ID NO: 2398 - RNA, 23 nt, Artificial Sequence
  miRNA Sequence
ugugacagugaaauucacaguau

SEQ ID NO: 2399 - RNA, 21 nt, Artificial Sequence
  miRNA Sequence
caaauggacaggauaacaccu

SEQ ID NO: 2400 - RNA, 21 nt, Artificial Sequence
  miRNA Sequence
agguguuauccuguccauuug

SEQ ID NO: 2401 - RNA, 22 nt, Artificial Sequence
  miRNA Sequence
agguguuauccuauccauuugc

SEQ ID NO: 2402 - RNA, 22 nt, Artificial Sequence
  miRNA Sequence
gcaaauggauaggauaacaccu

SEQ ID NO: 2403 - RNA, 22 nt, Artificial Sequence
  miRNA Sequence
ugaucucaccgcugccuccuuc

SEQ ID NO: 2404 - RNA, 22 nt, Artificial Sequence
  miRNA Sequence
gaaggaggcagcggugagauca

SEQ ID NO: 2405 - RNA, 22 nt, Artificial Sequence
  miRNA Sequence
caggaggcagugggcgagcagg

SEQ ID NO: 2406 - RNA, 22 nt, Artificial Sequence
  miRNA Sequence
ccugcucgcccacugccuccug

SEQ ID NO: 2407 - RNA, 22 nt, Artificial Sequence
  miRNA Sequence
ugcaagacggauacugucaucu

SEQ ID NO: 2408 - RNA, 22 nt, Artificial Sequence
  miRNA Sequence
agaugacaguauccgucuugca

SEQ ID NO: 2409 - RNA, 24 nt, Artificial Sequence
  miRNA Sequence
ugucagugacuccugccccuuggu

SEQ ID NO: 2410 - RNA, 24 nt, Artificial Sequence
  miRNA Sequence
accaaggggcaggagucacugaca

SEQ ID NO: 2411 - RNA, 22 nt, Artificial Sequence
  miRNA Sequence
agggggcgcagucacugacgug

SEQ ID NO: 2412 - RNA, 22 nt, Artificial Sequence
  miRNA Sequence
cacgucagugacugcgcccccu

SEQ ID NO: 2413 - RNA, 23 nt, Artificial Sequence
  miRNA Sequence
ucaaaauguagaggaagacccca

SEQ ID NO: 2414 - RNA, 23 nt, Artificial Sequence
  miRNA Sequence
uggggucuuccucuacauuuuga

SEQ ID NO: 2415 - RNA, 22 nt, Artificial Sequence
  miRNA Sequence
aauuuacucugcaaucuucucc

SEQ ID NO: 2416 - RNA, 22 nt, Artificial Sequence
  miRNA Sequence
ggagaagauugcagaguaaauu

SEQ ID NO: 2417 - RNA, 22 nt, Artificial Sequence
  miRNA Sequence
agaagauugcagaguaaguucc

SEQ ID NO: 2418 - RNA, 22 nt, Artificial Sequence
  miRNA Sequence
ggaacuuacucugcaaucuucu

SEQ ID NO: 2419 - RNA, 26 nt, Artificial Sequence
  miRNA Sequence
cacaggacugacuccucaccccagug

SEQ ID NO: 2420 - RNA, 26 nt, Artificial Sequence
  miRNA Sequence
cacuggggugaggagucaguccugug

SEQ ID NO: 2421 - RNA, 22 nt, Artificial Sequence
  miRNA Sequence
ucuggggaugaggacagugugu

SEQ ID NO: 2422 - RNA, 22 nt, Artificial Sequence
  miRNA Sequence
acacacuguccucauccccaga

SEQ ID NO: 2423 - RNA, 20 nt, Artificial Sequence
  miRNA Sequence
augggugauggguguggugu

SEQ ID NO: 2424 - RNA, 20 nt, Artificial Sequence
  miRNA Sequence
acaccacacccaucacccau

SEQ ID NO: 2425 - RNA, 22 nt, Artificial Sequence
  miRNA Sequence
uuggccaccacaccuaccccuu

SEQ ID NO: 2426 - RNA, 22 nt, Artificial Sequence
  miRNA Sequence
aagggguaggugugguggccaa

SEQ ID NO: 2427 - RNA, 22 nt, Artificial Sequence
  miRNA Sequence
uguaguuguauuguauugccac

SEQ ID NO: 2428 - RNA, 22 nt, Artificial Sequence
  miRNA Sequence
guggcaauacaauacaacuaca

SEQ ID NO: 2429 - RNA, 23 nt, Artificial Sequence
  miRNA Sequence
uagcaauacaguacaaauauagu

SEQ ID NO: 2430 - RNA, 23 nt, Artificial Sequence
  miRNA Sequence
acuauauuuguacuguauugcua

SEQ ID NO: 2431 - RNA, 22 nt, Artificial Sequence
  miRNA Sequence
ucagucacauaucuagugucua

SEQ ID NO: 2432 - RNA, 22 nt, Artificial Sequence
  miRNA Sequence
uagacacuagauaugugacuga

SEQ ID NO: 2433 - RNA, 22 nt, Artificial Sequence
  miRNA Sequence
gacacuaggcaugugagugauu

SEQ ID NO: 2434 - RNA, 22 nt, Artificial Sequence
  miRNA Sequence
aaucacucacaugccuaguguc

SEQ ID NO: 2435 - RNA, 22 nt, Artificial Sequence
  miRNA Sequence
ucaaucacuugguaauugcugu

SEQ ID NO: 2436 - RNA, 22 nt, Artificial Sequence
  miRNA Sequence
acagcaauuaccaagugauuga

SEQ ID NO: 2437 - RNA, 25 nt, Artificial Sequence
  miRNA Sequence
agcggggaggaagugggcgcugcuu

SEQ ID NO: 2438 - RNA, 25 nt, Artificial Sequence
  miRNA Sequence
aagcagcgcccacuuccuccccgcu

SEQ ID NO: 2439 - RNA, 22 nt, Artificial Sequence
  miRNA Sequence
agcccgccccagccgagguucu

SEQ ID NO: 2440 - RNA, 22 nt, Artificial Sequence
  miRNA Sequence
agaaccucggcuggggcgggcu

SEQ ID NO: 2441 - RNA, 23 nt, Artificial Sequence
  miRNA Sequence
gccccggcgcgggcggguucugg

SEQ ID NO: 2442 - RNA, 23 nt, Artificial Sequence
  miRNA Sequence
ccagaacccgcccgcgccggggc

SEQ ID NO: 2443 - RNA, 22 nt, Artificial Sequence
  miRNA Sequence
agcaaggcggcaucucucugau

SEQ ID NO: 2444 - RNA, 22 nt, Artificial Sequence
  miRNA Sequence
aucagagagaugccgccuugcu

SEQ ID NO: 2445 - RNA, 21 nt, Artificial Sequence
  miRNA Sequence
agagaugccgccuugcuccuu

SEQ ID NO: 2446 - RNA, 21 nt, Artificial Sequence
  miRNA Sequence
aaggagcaaggcggcaucucu

SEQ ID NO: 2447 - RNA, 23 nt, Artificial Sequence
  miRNA Sequence
uugaagaggaggugcucuguagc

SEQ ID NO: 2448 - RNA, 23 nt, Artificial Sequence
  miRNA Sequence
gcuacagagcaccuccucuucaa

SEQ ID NO: 2449 - RNA, 22 nt, Artificial Sequence
  miRNA Sequence
acaacagugacuugcucuccaa

SEQ ID NO: 2450 - RNA, 22 nt, Artificial Sequence
  miRNA Sequence
uuggagagcaagucacuguugu

SEQ ID NO: 2451 - RNA, 18 nt, Artificial Sequence
  miRNA Sequence
gggugagggcaggugguu

SEQ ID NO: 2452 - RNA, 18 nt, Artificial Sequence
  miRNA Sequence
aaccaccugcccucaccc

SEQ ID NO: 2453 - RNA, 18 nt, Artificial Sequence
  miRNA Sequence
cgugucuucuggcuugau

SEQ ID NO: 2454 - RNA, 18 nt, Artificial Sequence
  miRNA Sequence
aucaagccagaagacacg

SEQ ID NO: 2455 - RNA, 23 nt, Artificial Sequence
  miRNA Sequence
ugcaucaggccagaagacaugag

SEQ ID NO: 2456 - RNA, 23 nt, Artificial Sequence
  miRNA Sequence
cucaugucuucuggccugaugca

SEQ ID NO: 2457 - RNA, 21 nt, Artificial Sequence
  miRNA Sequence
aaugagagaccuguacuguau

SEQ ID NO: 2458 - RNA, 21 nt, Artificial Sequence
  miRNA Sequence
auacaguacaggucucucauu

SEQ ID NO: 2459 - RNA, 22 nt, Artificial Sequence
  miRNA Sequence
uccaguacaggucucucauuuc

SEQ ID NO: 2460 - RNA, 22 nt, Artificial Sequence
  miRNA Sequence
gaaaugagagaccuguacugga

SEQ ID NO: 2461 - RNA, 22 nt, Artificial Sequence
  miRNA Sequence
ugggauccagacagugggagaa

SEQ ID NO: 2462 - RNA, 22 nt, Artificial Sequence
  miRNA Sequence
uucucccacugucuggauccca

SEQ ID NO: 2463 - RNA, 22 nt, Artificial Sequence
  miRNA Sequence
uucucccacuaccaggcuccca

SEQ ID NO: 2464 - RNA, 22 nt, Artificial Sequence
  miRNA Sequence
ugggagccugguagugggagaa

SEQ ID NO: 2465 - RNA, 22 nt, Artificial Sequence
  miRNA Sequence
ccaaccuagguggucagaguug

SEQ ID NO: 2466 - RNA, 22 nt, Artificial Sequence
  miRNA Sequence
caacucugaccaccuagguugg

SEQ ID NO: 2467 - RNA, 22 nt, Artificial Sequence
  miRNA Sequence
aacucugaccccuuagguugau

SEQ ID NO: 2468 - RNA, 22 nt, Artificial Sequence
  miRNA Sequence
aucaaccuaaggggucagaguu

SEQ ID NO: 2469 - RNA, 23 nt, Artificial Sequence
  miRNA Sequence
gugccaccuuaacugcagccaau

SEQ ID NO: 2470 - RNA, 23 nt, Artificial Sequence
  miRNA Sequence
auuggcugcaguuaagguggcac

SEQ ID NO: 2471 - RNA, 22 nt, Artificial Sequence
  miRNA Sequence
aaguuggcugcaguuaaggugg

SEQ ID NO: 2472 - RNA, 22 nt, Artificial Sequence
  miRNA Sequence
ccaccuuaacugcagccaacuu

SEQ ID NO: 2473 - RNA, 22 nt, Artificial Sequence
  miRNA Sequence
aagggggaaggaaacauggaga

SEQ ID NO: 2474 - RNA, 22 nt, Artificial Sequence
  miRNA Sequence
ucuccauguuuccuucccccuu

SEQ ID NO: 2475 - RNA, 22 nt, Artificial Sequence
  miRNA Sequence
uccauguuuccuucccccuucu

SEQ ID NO: 2476 - RNA, 22 nt, Artificial Sequence
  miRNA Sequence
agaagggggaaggaaacaugga

SEQ ID NO: 2477 - RNA, 21 nt, Artificial Sequence
  miRNA Sequence
acacauggguggcuguggccu

SEQ ID NO: 2478 - RNA, 21 nt, Artificial Sequence
  miRNA Sequence
aggccacagccacccaugugu

SEQ ID NO: 2479 - RNA, 22 nt, Artificial Sequence
  miRNA Sequence
uaggccacagccacccaugugu

SEQ ID NO: 2480 - RNA, 22 nt, Artificial Sequence
  miRNA Sequence
acacauggguggcuguggccua

SEQ ID NO: 2481 - RNA, 21 nt, Artificial Sequence
  miRNA Sequence
agcuguaccugaaaccaagca

SEQ ID NO: 2482 - RNA, 21 nt, Artificial Sequence
  miRNA Sequence
ugcuugguuucagguacagcu

SEQ ID NO: 2483 - RNA, 22 nt, Artificial Sequence
  miRNA Sequence
ucacaaaucuauaauaugcagg

SEQ ID NO: 2484 - RNA, 22 nt, Artificial Sequence
  miRNA Sequence
ccugcauauuauagauuuguga

SEQ ID NO: 2485 - RNA, 21 nt, Artificial Sequence
  miRNA Sequence
ugcuuaaguuguaccaaguau

SEQ ID NO: 2486 - RNA, 21 nt, Artificial Sequence
  miRNA Sequence
auacuugguacaacuuaagca

SEQ ID NO: 2487 - RNA, 22 nt, Artificial Sequence
  miRNA Sequence
ccuggcauauuugguauaacuu

SEQ ID NO: 2488 - RNA, 22 nt, Artificial Sequence
  miRNA Sequence
aaguuauaccaaauaugccagg

SEQ ID NO: 2489 - RNA, 22 nt, Artificial Sequence
  miRNA Sequence
ugagggcuccaggugacggugg

SEQ ID NO: 2490 - RNA, 22 nt, Artificial Sequence
  miRNA Sequence
ccaccgucaccuggagcccuca

SEQ ID NO: 2491 - RNA, 22 nt, Artificial Sequence
  miRNA Sequence
accugccagcaccucccugcag

SEQ ID NO: 2492 - RNA, 22 nt, Artificial Sequence
  miRNA Sequence
cugcagggaggugcuggcaggu

SEQ ID NO: 2493 - RNA, 23 nt, Artificial Sequence
  miRNA Sequence
ggcaggagggcugugccagguug

SEQ ID NO: 2494 - RNA, 23 nt, Artificial Sequence
  miRNA Sequence
caaccuggcacagcccuccugcc

SEQ ID NO: 2495 - RNA, 22 nt, Artificial Sequence
  miRNA Sequence
cccucucuggcuccuccccaaa

SEQ ID NO: 2496 - RNA, 22 nt, Artificial Sequence
  miRNA Sequence
uuuggggaggagccagagaggg

SEQ ID NO: 2497 - RNA, 24 nt, Artificial Sequence
  miRNA Sequence
ugggggagccaugagauaagagca

SEQ ID NO: 2498 - RNA, 24 nt, Artificial Sequence
  miRNA Sequence
ugcucuuaucucauggcuccccca

SEQ ID NO: 2499 - RNA, 21 nt, Artificial Sequence
  miRNA Sequence
guaccuucugguucagcuagu

SEQ ID NO: 2500 - RNA, 21 nt, Artificial Sequence
  miRNA Sequence
acuagcugaaccagaagguac

SEQ ID NO: 2501 - RNA, 23 nt, Artificial Sequence
  miRNA Sequence
aacugaaccaggagugagcuucg

SEQ ID NO: 2502 - RNA, 23 nt, Artificial Sequence
  miRNA Sequence
cgaagcucacuccugguucaguu

SEQ ID NO: 2503 - RNA, 22 nt, Artificial Sequence
  miRNA Sequence
uggggaaggcgucagugucggg

SEQ ID NO: 2504 - RNA, 22 nt, Artificial Sequence
  miRNA Sequence
cccgacacugacgccuucccca

SEQ ID NO: 2505 - RNA, 21 nt, Artificial Sequence
  miRNA Sequence
agacccugcagccuucccacc

SEQ ID NO: 2506 - RNA, 21 nt, Artificial Sequence
  miRNA Sequence
ggugggaaggcugcagggucu

SEQ ID NO: 2507 - RNA, 22 nt, Artificial Sequence
  miRNA Sequence
acccagguucccucuggccgca

SEQ ID NO: 2508 - RNA, 22 nt, Artificial Sequence
  miRNA Sequence
ugcggccagagggaaccugggu

SEQ ID NO: 2509 - RNA, 23 nt, Artificial Sequence
  miRNA Sequence
agggccagaggagccuggagugg

SEQ ID NO: 2510 - RNA, 23 nt, Artificial Sequence
  miRNA Sequence
ccacuccaggcuccucuggcccu

SEQ ID NO: 2511 - RNA, 22 nt, Artificial Sequence
  miRNA Sequence
auagugggaagcuggcagauuc

SEQ ID NO: 2512 - RNA, 22 nt, Artificial Sequence
  miRNA Sequence
gaaucugccagcuucccacuau

SEQ ID NO: 2513 - RNA, 21 nt, Artificial Sequence
  miRNA Sequence
aucugccagcuuccacagugg

SEQ ID NO: 2514 - RNA, 21 nt, Artificial Sequence
  miRNA Sequence
ccacuguggaagcuggcagau

SEQ ID NO: 2515 - RNA, 25 nt, Artificial Sequence
  miRNA Sequence
caugcugaccucccuccugccccag

SEQ ID NO: 2516 - RNA, 25 nt, Artificial Sequence
  miRNA Sequence
cuggggcaggagggaggucagcaug

SEQ ID NO: 2517 - RNA, 23 nt, Artificial Sequence
  miRNA Sequence
ugggaggggagaggcagcaagca

SEQ ID NO: 2518 - RNA, 23 nt, Artificial Sequence
  miRNA Sequence
ugcuugcugccucuccccuccca

SEQ ID NO: 2519 - RNA, 22 nt, Artificial Sequence
  miRNA Sequence
ucauuuaucuguugggaagcua

SEQ ID NO: 2520 - RNA, 22 nt, Artificial Sequence
  miRNA Sequence
uagcuucccaacagauaaauga

SEQ ID NO: 2521 - RNA, 23 nt, Artificial Sequence
  miRNA Sequence
cuggcggagcccauuccaugcca

SEQ ID NO: 2522 - RNA, 23 nt, Artificial Sequence
  miRNA Sequence
uggcauggaaugggcuccgccag

SEQ ID NO: 2523 - RNA, 22 nt, Artificial Sequence
  miRNA Sequence
cacacaaguggcccccaacacu

SEQ ID NO: 2524 - RNA, 22 nt, Artificial Sequence
  miRNA Sequence
aguguugggggccacuugugug

SEQ ID NO: 2525 - RNA, 22 nt, Artificial Sequence
  miRNA Sequence
ugcugggggccacaugagugug

SEQ ID NO: 2526 - RNA, 22 nt, Artificial Sequence
  miRNA Sequence
cacacucauguggcccccagca

SEQ ID NO: 2527 - RNA, 21 nt, Artificial Sequence
  miRNA Sequence
gcccugaccuguccuguucug

SEQ ID NO: 2528 - RNA, 21 nt, Artificial Sequence
  miRNA Sequence
cagaacaggacaggucagggc

SEQ ID NO: 2529 - RNA, 23 nt, Artificial Sequence
  miRNA Sequence
uguagagcagggagcaggaagcu

SEQ ID NO: 2530 - RNA, 23 nt, Artificial Sequence
  miRNA Sequence
agcuuccugcucccugcucuaca

SEQ ID NO: 2531 - RNA, 22 nt, Artificial Sequence
  miRNA Sequence
ccaccaggucuagcauugggau

SEQ ID NO: 2532 - RNA, 22 nt, Artificial Sequence
  miRNA Sequence
aucccaaugcuagaccuggugg

SEQ ID NO: 2533 - RNA, 22 nt, Artificial Sequence
  miRNA Sequence
aaucccaaugcuagacccggug

SEQ ID NO: 2534 - RNA, 22 nt, Artificial Sequence
  miRNA Sequence
caccgggucuagcauugggauu

SEQ ID NO: 2535 - RNA, 22 nt, Artificial Sequence
  miRNA Sequence
gcugcgggcugcggucagggcg

SEQ ID NO: 2536 - RNA, 22 nt, Artificial Sequence
  miRNA Sequence
cgcccugaccgcagcccgcagc

SEQ ID NO: 2537 - RNA, 21 nt, Artificial Sequence
  miRNA Sequence
aaaggugcucaaauuagacau

SEQ ID NO: 2538 - RNA, 21 nt, Artificial Sequence
  miRNA Sequence
augucuaauuugagcaccuuu

SEQ ID NO: 2539 - RNA, 22 nt, Artificial Sequence
  miRNA Sequence
ccuaauuugaacaccuucggua

SEQ ID NO: 2540 - RNA, 22 nt, Artificial Sequence
  miRNA Sequence
uaccgaagguguucaaauuagg

SEQ ID NO: 2541 - RNA, 19 nt, Artificial Sequence
  miRNA Sequence
aggcagguuaucugggcug

SEQ ID NO: 2542 - RNA, 19 nt, Artificial Sequence
  miRNA Sequence
cagcccagauaaccugccu

SEQ ID NO: 2543 - RNA, 20 nt, Artificial Sequence
  miRNA Sequence
augcgaggaugcugacagug

SEQ ID NO: 2544 - RNA, 20 nt, Artificial Sequence
  miRNA Sequence
cacugucagcauccucgcau

SEQ ID NO: 2545 - RNA, 22 nt, Artificial Sequence
  miRNA Sequence
ugaaacuggagcgccuggagga

SEQ ID NO: 2546 - RNA, 22 nt, Artificial Sequence
  miRNA Sequence
uccuccaggcgcuccaguuuca

SEQ ID NO: 2547 - RNA, 22 nt, Artificial Sequence
  miRNA Sequence
accagcgcguuuucaguuucau

SEQ ID NO: 2548 - RNA, 22 nt, Artificial Sequence
  miRNA Sequence
augaaacugaaaacgcgcuggu

SEQ ID NO: 2549 - RNA, 25 nt, Artificial Sequence
  miRNA Sequence
aagggaggaggagcggaggggcccu

SEQ ID NO: 2550 - RNA, 25 nt, Artificial Sequence
  miRNA Sequence
agggccccuccgcuccuccucccuu

SEQ ID NO: 2551 - RNA, 22 nt, Artificial Sequence
  miRNA Sequence
gcccgagaggauccgucccugc

SEQ ID NO: 2552 - RNA, 22 nt, Artificial Sequence
  miRNA Sequence
gcagggacggauccucucgggc

SEQ ID NO: 2553 - RNA, 22 nt, Artificial Sequence
  miRNA Sequence
aggacugauccucucgggcagg

SEQ ID NO: 2554 - RNA, 22 nt, Artificial Sequence
  miRNA Sequence
ccugcccgagaggaucaguccu

SEQ ID NO: 2555 - RNA, 23 nt, Artificial Sequence
  miRNA Sequence
cgggcuguccggaggggucggcu

SEQ ID NO: 2556 - RNA, 23 nt, Artificial Sequence
  miRNA Sequence
agccgaccccuccggacagcccg

SEQ ID NO: 2557 - RNA, 23 nt, Artificial Sequence
  miRNA Sequence
ucuguauucuccuuugccugcag

SEQ ID NO: 2558 - RNA, 23 nt, Artificial Sequence
  miRNA Sequence
cugcaggcaaaggagaauacaga

SEQ ID NO: 2559 - RNA, 23 nt, Artificial Sequence
  miRNA Sequence
ucaggcaaagggauauuuacaga

SEQ ID NO: 2560 - RNA, 23 nt, Artificial Sequence
  miRNA Sequence
ucuguaaauaucccuuugccuga

SEQ ID NO: 2561 - RNA, 23 nt, Artificial Sequence
  miRNA Sequence
uggccggaugggacaggaggcau

SEQ ID NO: 2562 - RNA, 23 nt, Artificial Sequence
  miRNA Sequence
augccuccugucccauccggcca

SEQ ID NO: 2563 - RNA, 23 nt, Artificial Sequence
  miRNA Sequence
ucuaaagacuagacuucgcuaug

SEQ ID NO: 2564 - RNA, 23 nt, Artificial Sequence
  miRNA Sequence
cauagcgaagucuagucuuuaga

SEQ ID NO: 2565 - RNA, 23 nt, Artificial Sequence
  miRNA Sequence
uggcccggcgacgucucacgguc

SEQ ID NO: 2566 - RNA, 23 nt, Artificial Sequence
  miRNA Sequence
gaccgugagacgucgccgggcca

SEQ ID NO: 2567 - RNA, 23 nt, Artificial Sequence
  miRNA Sequence
ugaguggggcucccgggacggcg

SEQ ID NO: 2568 - RNA, 23 nt, Artificial Sequence
  miRNA Sequence
cgccgucccgggagccccacuca

SEQ ID NO: 2569 - RNA, 21 nt, Artificial Sequence
  miRNA Sequence
agcggugcuccugcgggccga

SEQ ID NO: 2570 - RNA, 21 nt, Artificial Sequence
  miRNA Sequence
ucggcccgcaggagcaccgcu

SEQ ID NO: 2571 - RNA, 23 nt, Artificial Sequence
  miRNA Sequence
ccggucccaggagaaccugcaga

SEQ ID NO: 2572 - RNA, 23 nt, Artificial Sequence
  miRNA Sequence
ucugcagguucuccugggaccgg

SEQ ID NO: 2573 - RNA, 22 nt, Artificial Sequence
  miRNA Sequence
aaggcccgggcuuuccucccag

SEQ ID NO: 2574 - RNA, 22 nt, Artificial Sequence
  miRNA Sequence
cugggaggaaagcccgggccuu

SEQ ID NO: 2575 - RNA, 22 nt, Artificial Sequence
  miRNA Sequence
agggaaggaggcuuggucuuag

SEQ ID NO: 2576 - RNA, 22 nt, Artificial Sequence
  miRNA Sequence
cuaagaccaagccuccuucccu

SEQ ID NO: 2577 - RNA, 21 nt, Artificial Sequence
  miRNA Sequence
gagguuuggggaggauuugcu

SEQ ID NO: 2578 - RNA, 21 nt, Artificial Sequence
  miRNA Sequence
agcaaauccuccccaaaccuc

SEQ ID NO: 2579 - RNA, 20 nt, Artificial Sequence
  miRNA Sequence
cgccccuccugcccccacag

SEQ ID NO: 2580 - RNA, 20 nt, Artificial Sequence
  miRNA Sequence
cugugggggcaggaggggcg

SEQ ID NO: 2581 - RNA, 22 nt, Artificial Sequence
  miRNA Sequence
ugcggggacaggccagggcauc

SEQ ID NO: 2582 - RNA, 22 nt, Artificial Sequence
  miRNA Sequence
gaugcccuggccuguccccgca

SEQ ID NO: 2583 - RNA, 22 nt, Artificial Sequence
  miRNA Sequence
cucgggcggaggugguugagug

SEQ ID NO: 2584 - RNA, 22 nt, Artificial Sequence
  miRNA Sequence
cacucaaccaccuccgcccgag

SEQ ID NO: 2585 - RNA, 24 nt, Artificial Sequence
  miRNA Sequence
agaggacccguagcugcuagaagg

SEQ ID NO: 2586 - RNA, 24 nt, Artificial Sequence
  miRNA Sequence
ccuucuagcagcuacggguccucu

SEQ ID NO: 2587 - RNA, 22 nt, Artificial Sequence
  miRNA Sequence
uuguggaucucaaggaugugcu

SEQ ID NO: 2588 - RNA, 22 nt, Artificial Sequence
  miRNA Sequence
agcacauccuugagauccacaa

SEQ ID NO: 2589 - RNA, 22 nt, Artificial Sequence
  miRNA Sequence
uucucuuucuuuagccuugugu

SEQ ID NO: 2590 - RNA, 22 nt, Artificial Sequence
  miRNA Sequence
acacaaggcuaaagaaagagaa

SEQ ID NO: 2591 - RNA, 22 nt, Artificial Sequence
  miRNA Sequence
caaggccaaaggaagagaacag

SEQ ID NO: 2592 - DNA, 22 bp, Artificial Sequence
  miRNA Sequence
ctgttctcttcctttggccttg

SEQ ID NO: 2593 - RNA, 23 nt, Artificial Sequence
  miRNA Sequence
augcggaccuggguuagcggagu

SEQ ID NO: 2594 - RNA, 23 nt, Artificial Sequence
  miRNA Sequence
acuccgcuaacccagguccgcau

SEQ ID NO: 2595 - RNA, 22 nt, Artificial Sequence
  miRNA Sequence
agccaggcucugaagggaaagu

SEQ ID NO: 2596 - RNA, 22 nt, Artificial Sequence
  miRNA Sequence
acuuucccuucagagccuggcu

SEQ ID NO: 2597 - RNA, 22 nt, Artificial Sequence
  miRNA Sequence
uuucccuucagagccuggcuuu

SEQ ID NO: 2598 - RNA, 22 nt, Artificial Sequence
  miRNA Sequence
aaagccaggcucugaagggaaa

SEQ ID NO: 2599 - RNA, 22 nt, Artificial Sequence
  miRNA Sequence
ccagagaugguugccuuccuau

SEQ ID NO: 2600 - RNA, 22 nt, Artificial Sequence
  miRNA Sequence
auaggaaggcaaccaucucugg

SEQ ID NO: 2601 - RNA, 23 nt, Artificial Sequence
  miRNA Sequence
cagggaggcgcucacucucugcu

SEQ ID NO: 2602 - RNA, 23 nt, Artificial Sequence
  miRNA Sequence
agcagagagugagcgccucccug

SEQ ID NO: 2603 - RNA, 22 nt, Artificial Sequence
  miRNA Sequence
caugacgucacagaggcuucgc

SEQ ID NO: 2604 - RNA, 22 nt, Artificial Sequence
  miRNA Sequence
gcgaagccucugugacgucaug

SEQ ID NO: 2605 - RNA, 23 nt, Artificial Sequence
  miRNA Sequence
aggccucugugacgucacggugu

SEQ ID NO: 2606 - RNA, 23 nt, Artificial Sequence
  miRNA Sequence
acaccgugacgucacagaggccu

SEQ ID NO: 2607 - RNA, 23 nt, Artificial Sequence
  miRNA Sequence
ugccccaccugcugaccacccuc

SEQ ID NO: 2608 - RNA, 23 nt, Artificial Sequence
  miRNA Sequence
gaggguggucagcagguggggca

SEQ ID NO: 2609 - RNA, 23 nt, Artificial Sequence
  miRNA Sequence
gugagugggagccgguggggcug

SEQ ID NO: 2610 - RNA, 23 nt, Artificial Sequence
  miRNA Sequence
cagccccaccggcucccacucac

SEQ ID NO: 2611 - RNA, 21 nt, Artificial Sequence
  miRNA Sequence
uaggacuagauguuggaauua

SEQ ID NO: 2612 - RNA, 21 nt, Artificial Sequence
  miRNA Sequence
uaauuccaacaucuaguccua

SEQ ID NO: 2613 - RNA, 22 nt, Artificial Sequence
  miRNA Sequence
aaauucauguucaaucuaaacc

SEQ ID NO: 2614 - RNA, 22 nt, Artificial Sequence
  miRNA Sequence
gguuuagauugaacaugaauuu

SEQ ID NO: 2615 - RNA, 22 nt, Artificial Sequence
  miRNA Sequence
uuuagauugaacaugaaguuag

SEQ ID NO: 2616 - RNA, 22 nt, Artificial Sequence
  miRNA Sequence
cuaacuucauguucaaucuaaa

SEQ ID NO: 2617 - RNA, 21 nt, Artificial Sequence
  miRNA Sequence
gagggcaugcgcacuuugucc

SEQ ID NO: 2618 - RNA, 21 nt, Artificial Sequence
  miRNA Sequence
ggacaaagugcgcaugcccuc

SEQ ID NO: 2619 - RNA, 21 nt, Artificial Sequence
  miRNA Sequence
acaaggugugcaugccugacc

SEQ ID NO: 2620 - RNA, 21 nt, Artificial Sequence
  miRNA Sequence
ggucaggcaugcacaccuugu

SEQ ID NO: 2621 - RNA, 22 nt, Artificial Sequence
  miRNA Sequence
cuucugaucaagauuuguggug

SEQ ID NO: 2622 - RNA, 22 nt, Artificial Sequence
  miRNA Sequence
caccacaaaucuugaucagaag

SEQ ID NO: 2623 - RNA, 21 nt, Artificial Sequence
  miRNA Sequence
ccaaaucuugaucagaagccu

SEQ ID NO: 2624 - RNA, 21 nt, Artificial Sequence
  miRNA Sequence
aggcuucugaucaagauuugg

SEQ ID NO: 2625 - RNA, 24 nt, Artificial Sequence
  miRNA Sequence
aggcaggggcuggugcugggcggg

SEQ ID NO: 2626 - RNA, 24 nt, Artificial Sequence
  miRNA Sequence
cccgcccagcaccagccccugccu

SEQ ID NO: 2627 - RNA, 21 nt, Artificial Sequence
  miRNA Sequence
cgccugcccagcccuccugcu

SEQ ID NO: 2628 - RNA, 21 nt, Artificial Sequence
  miRNA Sequence
agcaggagggcugggcaggcg

SEQ ID NO: 2629 - RNA, 22 nt, Artificial Sequence
  miRNA Sequence
uuaacuccuuucacacccaugg

SEQ ID NO: 2630 - RNA, 22 nt, Artificial Sequence
  miRNA Sequence
ccaugggugugaaaggaguuaa

SEQ ID NO: 2631 - RNA, 21 nt, Artificial Sequence
  miRNA Sequence
uggauguggaaggaguuaucu

SEQ ID NO: 2632 - RNA, 21 nt, Artificial Sequence
  miRNA Sequence
agauaacuccuuccacaucca

SEQ ID NO: 2633 - RNA, 22 nt, Artificial Sequence
  miRNA Sequence
ugagugauugauagcuauguuc

SEQ ID NO: 2634 - RNA, 22 nt, Artificial Sequence
  miRNA Sequence
gaacauagcuaucaaucacuca

SEQ ID NO: 2635 - RNA, 21 nt, Artificial Sequence
  miRNA Sequence
auagcaauugcucuuuuggaa

SEQ ID NO: 2636 - RNA, 21 nt, Artificial Sequence
  miRNA Sequence
uuccaaaagagcaauugcuau

SEQ ID NO: 2637 - RNA, 21 nt, Artificial Sequence
  miRNA Sequence
ucugaaagagcaguugguguu

SEQ ID NO: 2638 - RNA, 21 nt, Artificial Sequence
  miRNA Sequence
aacaccaacugcucuuucaga

SEQ ID NO: 2639 - RNA, 23 nt, Artificial Sequence
  miRNA Sequence
cgcgggcgcuccuggccgccgcc

SEQ ID NO: 2640 - RNA, 23 nt, Artificial Sequence
  miRNA Sequence
ggcggcggccaggagcgcccgcg

SEQ ID NO: 2641 - RNA, 20 nt, Artificial Sequence
  miRNA Sequence
ccaggagauccagagagaau

SEQ ID NO: 2642 - RNA, 20 nt, Artificial Sequence
  miRNA Sequence
auucucucuggaucuccugg

SEQ ID NO: 2643 - RNA, 22 nt, Artificial Sequence
  miRNA Sequence
auucucucuggaucccauggau

SEQ ID NO: 2644 - RNA, 22 nt, Artificial Sequence
  miRNA Sequence
auccaugggauccagagagaau

SEQ ID NO: 2645 - RNA, 22 nt, Artificial Sequence
  miRNA Sequence
ucugccauccucccuccccuac

SEQ ID NO: 2646 - RNA, 22 nt, Artificial Sequence
  miRNA Sequence
guaggggagggaggauggcaga

SEQ ID NO: 2647 - RNA, 24 nt, Artificial Sequence
  miRNA Sequence
ggugggauggagagaagguaugag

SEQ ID NO: 2648 - RNA, 24 nt, Artificial Sequence
  miRNA Sequence
cucauaccuucucuccaucccacc

SEQ ID NO: 2649 - RNA, 18 nt, Artificial Sequence
  miRNA Sequence
ugagaugacacuguagcu

SEQ ID NO: 2650 - RNA, 18 nt, Artificial Sequence
  miRNA Sequence
agcuacagugucaucuca

SEQ ID NO: 2651 - RNA, 21 nt, Artificial Sequence
  miRNA Sequence
agcagacuugaccuacaauua

SEQ ID NO: 2652 - RNA, 21 nt, Artificial Sequence
  miRNA Sequence
uaauuguaggucaagucugcu

SEQ ID NO: 2653 - RNA, 22 nt, Artificial Sequence
  miRNA Sequence
ccugcaacuuugccugaucaga

SEQ ID NO: 2654 - RNA, 22 nt, Artificial Sequence
  miRNA Sequence
ucugaucaggcaaaguugcagg

SEQ ID NO: 2655 - RNA, 22 nt, Artificial Sequence
  miRNA Sequence
ugaucaggcaaaauugcagacu

SEQ ID NO: 2656 - RNA, 22 nt, Artificial Sequence
  miRNA Sequence
agucugcaauuuugccugauca

SEQ ID NO: 2657 - RNA, 22 nt, Artificial Sequence
  miRNA Sequence
cagaacaggagcauagaaaggc

SEQ ID NO: 2658 - RNA, 22 nt, Artificial Sequence
  miRNA Sequence
gccuuucuaugcuccuguucug

SEQ ID NO: 2659 - RNA, 21 nt, Artificial Sequence
  miRNA Sequence
auugccuaacaugugccagaa

SEQ ID NO: 2660 - RNA, 21 nt, Artificial Sequence
  miRNA Sequence
uucuggcacauguuaggcaau

SEQ ID NO: 2661 - RNA, 22 nt, Artificial Sequence
  miRNA Sequence
ucugguauguaguagguaauaa

SEQ ID NO: 2662 - RNA, 22 nt, Artificial Sequence
  miRNA Sequence
uuauuaccuacuacauaccaga

SEQ ID NO: 2663 - RNA, 22 nt, Artificial Sequence
  miRNA Sequence
uuaauuuuuuguuucggucacu

SEQ ID NO: 2664 - RNA, 22 nt, Artificial Sequence
  miRNA Sequence
agugaccgaaacaaaaaauuaa

SEQ ID NO: 2665 - RNA, 23 nt, Artificial Sequence
  miRNA Sequence
cuugccauccugguccacugcau

SEQ ID NO: 2666 - RNA, 23 nt, Artificial Sequence
  miRNA Sequence
augcaguggaccaggauggcaag

SEQ ID NO: 2667 - RNA, 22 nt, Artificial Sequence
  miRNA Sequence
guggaccaggauggcaagggcu

SEQ ID NO: 2668 - RNA, 22 nt, Artificial Sequence
  miRNA Sequence
agcccuugccauccugguccac

SEQ ID NO: 2669 - RNA, 22 nt, Artificial Sequence
  miRNA Sequence
auaccucaucuagaaugcugua

SEQ ID NO: 2670 - RNA, 22 nt, Artificial Sequence
  miRNA Sequence
uacagcauucuagaugagguau

SEQ ID NO: 2671 - RNA, 22 nt, Artificial Sequence
  miRNA Sequence
uucuagaugagagauauauaua

SEQ ID NO: 2672 - RNA, 22 nt, Artificial Sequence
  miRNA Sequence
uauauauaucucucaucuagaa

SEQ ID NO: 2673 - RNA, 22 nt, Artificial Sequence
  miRNA Sequence
ucuucuuccuuugcagaguuga

SEQ ID NO: 2674 - RNA, 22 nt, Artificial Sequence
  miRNA Sequence
ucaacucugcaaaggaagaaga

SEQ ID NO: 2675 - RNA, 22 nt, Artificial Sequence
  miRNA Sequence
aauucuguaaaggaagaagagg

SEQ ID NO: 2676 - RNA, 22 nt, Artificial Sequence
  miRNA Sequence
ccucuucuuccuuuacagaauu

SEQ ID NO: 2677 - RNA, 22 nt, Artificial Sequence
  miRNA Sequence
uaggagggaauaguaaaagcag

SEQ ID NO: 2678 - RNA, 22 nt, Artificial Sequence
  miRNA Sequence
cugcuuuuacuauucccuccua

SEQ ID NO: 2679 - RNA, 22 nt, Artificial Sequence
  miRNA Sequence
acccuugagccugaucccuagc

SEQ ID NO: 2680 - RNA, 22 nt, Artificial Sequence
  miRNA Sequence
gcuagggaucaggcucaagggu

SEQ ID NO: 2681 - RNA, 22 nt, Artificial Sequence
  miRNA Sequence
aauguuggaauccucgcuagag

SEQ ID NO: 2682 - RNA, 22 nt, Artificial Sequence
  miRNA Sequence
cucuagcgaggauuccaacauu

SEQ ID NO: 2683 - RNA, 21 nt, Artificial Sequence
  miRNA Sequence
uagcggggauuccaauauugg

SEQ ID NO: 2684 - RNA, 21 nt, Artificial Sequence
  miRNA Sequence
ccaauauuggaauccccgcua

SEQ ID NO: 2685 - RNA, 22 nt, Artificial Sequence
  miRNA Sequence
ugauugucuucauaucuagaac

SEQ ID NO: 2686 - RNA, 22 nt, Artificial Sequence
  miRNA Sequence
guucuagauaugaagacaauca

SEQ ID NO: 2687 - RNA, 22 nt, Artificial Sequence
  miRNA Sequence
uucuggauaugaagacaaucaa

SEQ ID NO: 2688 - RNA, 22 nt, Artificial Sequence
  miRNA Sequence
uugauugucuucauauccagaa

SEQ ID NO: 2689 - RNA, 23 nt, Artificial Sequence
  miRNA Sequence
ccccgguguuggggcgcgucugc

SEQ ID NO: 2690 - RNA, 23 nt, Artificial Sequence
  miRNA Sequence
gcagacgcgccccaacaccgggg

SEQ ID NO: 2691 - RNA, 21 nt, Artificial Sequence
  miRNA Sequence
ggcgcgcccagcucccgggcu

SEQ ID NO: 2692 - RNA, 21 nt, Artificial Sequence
  miRNA Sequence
agcccgggagcugggcgcgcc

SEQ ID NO: 2693 - RNA, 20 nt, Artificial Sequence
  miRNA Sequence
ugaggagaugcugggacuga

SEQ ID NO: 2694 - RNA, 20 nt, Artificial Sequence
  miRNA Sequence
ucagucccagcaucuccuca

SEQ ID NO: 2695 - RNA, 21 nt, Artificial Sequence
  miRNA Sequence
agagucggcgacgccgccagc

SEQ ID NO: 2696 - RNA, 21 nt, Artificial Sequence
  miRNA Sequence
gcuggcggcgucgccgacucu

SEQ ID NO: 2697 - RNA, 22 nt, Artificial Sequence
  miRNA Sequence
ugaagccagcucuggucugggc

SEQ ID NO: 2698 - RNA, 22 nt, Artificial Sequence
  miRNA Sequence
gcccagaccagagcuggcuuca

SEQ ID NO: 2699 - RNA, 22 nt, Artificial Sequence
  miRNA Sequence
ugagaccaggacuggaugcacc

SEQ ID NO: 2700 - RNA, 22 nt, Artificial Sequence
  miRNA Sequence
ggugcauccaguccuggucuca

SEQ ID NO: 2701 - RNA, 24 nt, Artificial Sequence
  miRNA Sequence
gaugcgccgcccacugccccgcgc

SEQ ID NO: 2702 - RNA, 24 nt, Artificial Sequence
  miRNA Sequence
gcgcggggcagugggcggcgcauc

SEQ ID NO: 2703 - RNA, 22 nt, Artificial Sequence
  miRNA Sequence
gcggggguggcggcggcauccc

SEQ ID NO: 2704 - RNA, 22 nt, Artificial Sequence
  miRNA Sequence
gggaugccgccgccacccccgc

SEQ ID NO: 2705 - RNA, 22 nt, Artificial Sequence
  miRNA Sequence
uuacggaccagcuaagggaggc

SEQ ID NO: 2706 - RNA, 22 nt, Artificial Sequence
  miRNA Sequence
gccucccuuagcugguccguaa

SEQ ID NO: 2707 - RNA, 21 nt, Artificial Sequence
  miRNA Sequence
cacacauagcagguguauaua

SEQ ID NO: 2708 - RNA, 21 nt, Artificial Sequence
  miRNA Sequence
uauauacaccugcuaugugug

SEQ ID NO: 2709 - RNA, 22 nt, Artificial Sequence
  miRNA Sequence
guauacaccugauauguguaug

SEQ ID NO: 2710 - RNA, 22 nt, Artificial Sequence
  miRNA Sequence
cauacacauaucagguguauac

SEQ ID NO: 2711 - RNA, 22 nt, Artificial Sequence
  miRNA Sequence
ugaaugguaaagcgaugucaca

SEQ ID NO: 2712 - RNA, 22 nt, Artificial Sequence
  miRNA Sequence
ugugacaucgcuuuaccauuca

SEQ ID NO: 2713 - RNA, 20 nt, Artificial Sequence
  miRNA Sequence
aucgcuuuaccauucauguu

SEQ ID NO: 2714 - RNA, 20 nt, Artificial Sequence
  miRNA Sequence
aacaugaaugguaaagcgau

SEQ ID NO: 2715 - RNA, 18 nt, Artificial Sequence
  miRNA Sequence
uggauaugaugacugaaa

SEQ ID NO: 2716 - RNA, 18 nt, Artificial Sequence
  miRNA Sequence
uuucagucaucauaucca

SEQ ID NO: 2717 - RNA, 18 nt, Artificial Sequence
  miRNA Sequence
cggugagcgcucgcuggc

SEQ ID NO: 2718 - RNA, 18 nt, Artificial Sequence
  miRNA Sequence
gccagcgagcgcucaccg

SEQ ID NO: 2719 - RNA, 23 nt, Artificial Sequence
  miRNA Sequence
ucugcacugugaguuggcuggcu

SEQ ID NO: 2720 - RNA, 23 nt, Artificial Sequence
  miRNA Sequence
agccagccaacucacagugcaga

SEQ ID NO: 2721 - RNA, 24 nt, Artificial Sequence
  miRNA Sequence
acauccugcuccacagggcagagg

SEQ ID NO: 2722 - RNA, 24 nt, Artificial Sequence
  miRNA Sequence
ccucugcccuguggagcaggaugu

SEQ ID NO: 2723 - RNA, 22 nt, Artificial Sequence
  miRNA Sequence
ucuggcuaucucacgagacugu

SEQ ID NO: 2724 - RNA, 22 nt, Artificial Sequence
  miRNA Sequence
acagucucgugagauagccaga

SEQ ID NO: 2725 - RNA, 22 nt, Artificial Sequence
  miRNA Sequence
auauuauuagccacuucuggau

SEQ ID NO: 2726 - RNA, 22 nt, Artificial Sequence
  miRNA Sequence
auccagaaguggcuaauaauau

SEQ ID NO: 2727 - RNA, 21 nt, Artificial Sequence
  miRNA Sequence
agaaguggcuaauaauauuga

SEQ ID NO: 2728 - RNA, 21 nt, Artificial Sequence
  miRNA Sequence
ucaauauuauuagccacuucu

SEQ ID NO: 2729 - RNA, 22 nt, Artificial Sequence
  miRNA Sequence
uaaaguggcagaguauagacac

SEQ ID NO: 2730 - RNA, 22 nt, Artificial Sequence
  miRNA Sequence
gugucuauacucugccacuuua

SEQ ID NO: 2731 - RNA, 22 nt, Artificial Sequence
  miRNA Sequence
ugucuauacucugucacuuuac

SEQ ID NO: 2732 - RNA, 22 nt, Artificial Sequence
  miRNA Sequence
guaaagugacagaguauagaca

SEQ ID NO: 2733 - RNA, 21 nt, Artificial Sequence
  miRNA Sequence
ucucaguaaguggcacucugu

SEQ ID NO: 2734 - RNA, 21 nt, Artificial Sequence
  miRNA Sequence
acagagugccacuuacugaga

SEQ ID NO: 2735 - RNA, 21 nt, Artificial Sequence
  miRNA Sequence
gacagagugccacuuacugaa

SEQ ID NO: 2736 - RNA, 21 nt, Artificial Sequence
  miRNA Sequence
uucaguaaguggcacucuguc

SEQ ID NO: 2737 - RNA, 22 nt, Artificial Sequence
  miRNA Sequence
aacucacgaaguauaccgaagu

SEQ ID NO: 2738 - RNA, 22 nt, Artificial Sequence
  miRNA Sequence
acuucgguauacuucgugaguu

SEQ ID NO: 2739 - RNA, 22 nt, Artificial Sequence
  miRNA Sequence
uucgguauacuuugugaauugg

SEQ ID NO: 2740 - RNA, 22 nt, Artificial Sequence
  miRNA Sequence
ccaauucacaaaguauaccgaa

SEQ ID NO: 2741 - RNA, 22 nt, Artificial Sequence
  miRNA Sequence
acuggcaugcugcauuuauaua

SEQ ID NO: 2742 - RNA, 22 nt, Artificial Sequence
  miRNA Sequence
uauauaaaugcagcaugccagu

SEQ ID NO: 2743 - RNA, 22 nt, Artificial Sequence
  miRNA Sequence
aucuaaaugcagcaugccaguc

SEQ ID NO: 2744 - RNA, 22 nt, Artificial Sequence
  miRNA Sequence
gacuggcaugcugcauuuagau

SEQ ID NO: 2745 - RNA, 19 nt, Artificial Sequence
  miRNA Sequence
cauccguccgucuguccac

SEQ ID NO: 2746 - RNA, 19 nt, Artificial Sequence
  miRNA Sequence
guggacagacggacggaug

SEQ ID NO: 2747 - RNA, 21 nt, Artificial Sequence
  miRNA Sequence
aguggaccgaggaaggaagga

SEQ ID NO: 2748 - RNA, 21 nt, Artificial Sequence
  miRNA Sequence
uccuuccuuccucgguccacu

SEQ ID NO: 2749 - RNA, 22 nt, Artificial Sequence
  miRNA Sequence
uacacaagaaaaccaaggcuca

SEQ ID NO: 2750 - RNA, 22 nt, Artificial Sequence
  miRNA Sequence
ugagccuugguuuucuugugua

SEQ ID NO: 2751 - RNA, 23 nt, Artificial Sequence
  miRNA Sequence
uacauggauggaaaccuucaagc

SEQ ID NO: 2752 - RNA, 23 nt, Artificial Sequence
  miRNA Sequence
gcuugaagguuuccauccaugua

SEQ ID NO: 2753 - RNA, 22 nt, Artificial Sequence
  miRNA Sequence
uauggagguucuagaccauguu

SEQ ID NO: 2754 - RNA, 22 nt, Artificial Sequence
  miRNA Sequence
aacauggucuagaaccuccaua

SEQ ID NO: 2755 - RNA, 21 nt, Artificial Sequence
  miRNA Sequence
uaacauaauaguguggauuga

SEQ ID NO: 2756 - RNA, 21 nt, Artificial Sequence
  miRNA Sequence
ucaauccacacuauuauguua

SEQ ID NO: 2757 - RNA, 21 nt, Artificial Sequence
  miRNA Sequence
ugcuuaaccuugcccucgaaa

SEQ ID NO: 2758 - RNA, 21 nt, Artificial Sequence
  miRNA Sequence
uuucgagggcaagguuaagca

SEQ ID NO: 2759 - RNA, 21 nt, Artificial Sequence
  miRNA Sequence
uuggacgguaagguuaagcaa

SEQ ID NO: 2760 - RNA, 21 nt, Artificial Sequence
  miRNA Sequence
uugcuuaaccuuaccguccaa

SEQ ID NO: 2761 - RNA, 21 nt, Artificial Sequence
  miRNA Sequence
ucacuccucuccucccgucuu

SEQ ID NO: 2762 - RNA, 21 nt, Artificial Sequence
  miRNA Sequence
aagacgggaggagaggaguga

SEQ ID NO: 2763 - RNA, 22 nt, Artificial Sequence
  miRNA Sequence
aagacgggaggaaagaagggag

SEQ ID NO: 2764 - DNA, 22 bp, Artificial Sequence
  miRNA Sequence
ctcccttctttcctcccgtctt

SEQ ID NO: 2765 - RNA, 22 nt, Artificial Sequence
  miRNA Sequence
ucaggcucaguccccucccgau

SEQ ID NO: 2766 - RNA, 22 nt, Artificial Sequence
  miRNA Sequence
aucgggaggggacugagccuga

SEQ ID NO: 2767 - RNA, 22 nt, Artificial Sequence
  miRNA Sequence
gucauacacggcucuccucucu

SEQ ID NO: 2768 - RNA, 22 nt, Artificial Sequence
  miRNA Sequence
agagaggagagccguguaugac

SEQ ID NO: 2769 - RNA, 22 nt, Artificial Sequence
  miRNA Sequence
agaggcuggccgugaugaauuc

SEQ ID NO: 2770 - RNA, 22 nt, Artificial Sequence
  miRNA Sequence
gaauucaucacggccagccucu

SEQ ID NO: 2771 - RNA, 21 nt, Artificial Sequence
  miRNA Sequence
cggggcagcucaguacaggau

SEQ ID NO: 2772 - RNA, 21 nt, Artificial Sequence
  miRNA Sequence
auccuguacugagcugccccg

SEQ ID NO: 2773 - RNA, 22 nt, Artificial Sequence
  miRNA Sequence
uccuguacugagcugccccgag

SEQ ID NO: 2774 - RNA, 22 nt, Artificial Sequence
  miRNA Sequence
cucggggcagcucaguacagga

SEQ ID NO: 2775 - RNA, 22 nt, Artificial Sequence
  miRNA Sequence
aaucauacagggacauccaguu

SEQ ID NO: 2776 - RNA, 22 nt, Artificial Sequence
  miRNA Sequence
aacuggaugucccuguaugauu

SEQ ID NO: 2777 - RNA, 22 nt, Artificial Sequence
  miRNA Sequence
aaucguacagggucauccacuu

SEQ ID NO: 2778 - RNA, 22 nt, Artificial Sequence
  miRNA Sequence
aaguggaugacccuguacgauu

SEQ ID NO: 2779 - RNA, 21 nt, Artificial Sequence
  miRNA Sequence
uugaaaggcuauuucuugguc

SEQ ID NO: 2780 - RNA, 21 nt, Artificial Sequence
  miRNA Sequence
gaccaagaaauagccuuucaa

SEQ ID NO: 2781 - RNA, 21 nt, Artificial Sequence
  miRNA Sequence
cccagauaauggcacucucaa

SEQ ID NO: 2782 - RNA, 21 nt, Artificial Sequence
  miRNA Sequence
uugagagugccauuaucuggg

SEQ ID NO: 2783 - RNA, 22 nt, Artificial Sequence
  miRNA Sequence
gugacaucacauauacggcagc

SEQ ID NO: 2784 - RNA, 22 nt, Artificial Sequence
  miRNA Sequence
gcugccguauaugugaugucac

SEQ ID NO: 2785 - RNA, 22 nt, Artificial Sequence
  miRNA Sequence
caaccuggaggacuccaugcug

SEQ ID NO: 2786 - RNA, 22 nt, Artificial Sequence
  miRNA Sequence
cagcauggaguccuccagguug

SEQ ID NO: 2787 - RNA, 20 nt, Artificial Sequence
  miRNA Sequence
ccauggaucuccaggugggu

SEQ ID NO: 2788 - RNA, 20 nt, Artificial Sequence
  miRNA Sequence
acccaccuggagauccaugg

SEQ ID NO: 2789 - RNA, 22 nt, Artificial Sequence
  miRNA Sequence
cuuaugcaagauucccuucuac

SEQ ID NO: 2790 - RNA, 22 nt, Artificial Sequence
  miRNA Sequence
guagaagggaaucuugcauaag

SEQ ID NO: 2791 - RNA, 22 nt, Artificial Sequence
  miRNA Sequence
aguggggaacccuuccaugagg

SEQ ID NO: 2792 - RNA, 22 nt, Artificial Sequence
  miRNA Sequence
ccucauggaaggguuccccacu

SEQ ID NO: 2793 - RNA, 23 nt, Artificial Sequence
  miRNA Sequence
aggaccugcgggacaagauucuu

SEQ ID NO: 2794 - RNA, 23 nt, Artificial Sequence
  miRNA Sequence
aagaaucuugucccgcagguccu

SEQ ID NO: 2795 - RNA, 22 nt, Artificial Sequence
  miRNA Sequence
ugaaggucuacugugugccagg

SEQ ID NO: 2796 - RNA, 22 nt, Artificial Sequence
  miRNA Sequence
ccuggcacacaguagaccuuca

SEQ ID NO: 2797 - RNA, 22 nt, Artificial Sequence
  miRNA Sequence
uuguacaugguaggcuuucauu

SEQ ID NO: 2798 - RNA, 22 nt, Artificial Sequence
  miRNA Sequence
aaugaaagccuaccauguacaa

SEQ ID NO: 2799 - RNA, 22 nt, Artificial Sequence
  miRNA Sequence
ugaaacauacacgggaaaccuc

SEQ ID NO: 2800 - RNA, 22 nt, Artificial Sequence
  miRNA Sequence
gagguuucccguguauguuuca

SEQ ID NO: 2801 - RNA, 22 nt, Artificial Sequence
  miRNA Sequence
aaacaaacauggugcacuucuu

SEQ ID NO: 2802 - RNA, 22 nt, Artificial Sequence
  miRNA Sequence
aagaagugcaccauguuuguuu

SEQ ID NO: 2803 - RNA, 22 nt, Artificial Sequence
  miRNA Sequence
ugaguauuacauggccaaucuc

SEQ ID NO: 2804 - RNA, 22 nt, Artificial Sequence
  miRNA Sequence
gagauuggccauguaauacuca

SEQ ID NO: 2805 - RNA, 22 nt, Artificial Sequence
  miRNA Sequence
caaaccacacugugguguuaga

SEQ ID NO: 2806 - RNA, 22 nt, Artificial Sequence
  miRNA Sequence
ucuaacaccacagugugguuug

SEQ ID NO: 2807 - RNA, 21 nt, Artificial Sequence
  miRNA Sequence
cagcagcacacugugguuugu

SEQ ID NO: 2808 - RNA, 21 nt, Artificial Sequence
  miRNA Sequence
acaaaccacagugugcugcug

SEQ ID NO: 2809 - RNA, 23 nt, Artificial Sequence
  miRNA Sequence
uuucaagccagggggcguuuuuc

SEQ ID NO: 2810 - RNA, 23 nt, Artificial Sequence
  miRNA Sequence
gaaaaacgcccccuggcuugaaa

SEQ ID NO: 2811 - RNA, 20 nt, Artificial Sequence
  miRNA Sequence
ucacuaccugacaauacagu

SEQ ID NO: 2812 - RNA, 20 nt, Artificial Sequence
  miRNA Sequence
acuguauugucagguaguga

SEQ ID NO: 2813 - RNA, 21 nt, Artificial Sequence
  miRNA Sequence
ugcuguauugucagguaguga

SEQ ID NO: 2814 - RNA, 21 nt, Artificial Sequence
  miRNA Sequence
ucacuaccugacaauacagca

SEQ ID NO: 2815 - RNA, 22 nt, Artificial Sequence
  miRNA Sequence
aacaucacagcaagucugugcu

SEQ ID NO: 2816 - RNA, 22 nt, Artificial Sequence
  miRNA Sequence
agcacagacuugcugugauguu

SEQ ID NO: 2817 - RNA, 21 nt, Artificial Sequence
  miRNA Sequence
uuaagacuugcagugauguuu

SEQ ID NO: 2818 - RNA, 21 nt, Artificial Sequence
  miRNA Sequence
aaacaucacugcaagucuuaa

SEQ ID NO: 2819 - RNA, 22 nt, Artificial Sequence
  miRNA Sequence
aacaucacugcaagucuuaaca

SEQ ID NO: 2820 - RNA, 22 nt, Artificial Sequence
  miRNA Sequence
uguuaagacuugcagugauguu

SEQ ID NO: 2821 - RNA, 21 nt, Artificial Sequence
  miRNA Sequence
acagacuugcugugauguuca

SEQ ID NO: 2822 - RNA, 21 nt, Artificial Sequence
  miRNA Sequence
ugaacaucacagcaagucugu

SEQ ID NO: 2823 - RNA, 22 nt, Artificial Sequence
  miRNA Sequence
ucaggacacuucugaacuugga

SEQ ID NO: 2824 - RNA, 22 nt, Artificial Sequence
  miRNA Sequence
uccaaguucagaaguguccuga

SEQ ID NO: 2825 - RNA, 22 nt, Artificial Sequence
  miRNA Sequence
caguucagaaguguuccugagu

SEQ ID NO: 2826 - RNA, 22 nt, Artificial Sequence
  miRNA Sequence
acucaggaacacuucugaacug

SEQ ID NO: 2827 - RNA, 22 nt, Artificial Sequence
  miRNA Sequence
uucugccucuguccagguccuu

SEQ ID NO: 2828 - RNA, 22 nt, Artificial Sequence
  miRNA Sequence
aaggaccuggacagaggcagaa

SEQ ID NO: 2829 - RNA, 24 nt, Artificial Sequence
  miRNA Sequence
agggcuggacucagcggcggagcu

SEQ ID NO: 2830 - RNA, 24 nt, Artificial Sequence
  miRNA Sequence
agcuccgccgcugaguccagcccu

SEQ ID NO: 2831 - RNA, 21 nt, Artificial Sequence
  miRNA Sequence
ugacugccucacugaccacuu

SEQ ID NO: 2832 - RNA, 21 nt, Artificial Sequence
  miRNA Sequence
aaguggucagugaggcaguca

SEQ ID NO: 2833 - RNA, 24 nt, Artificial Sequence
  miRNA Sequence
aauuugguuucugaggcacuuagu

SEQ ID NO: 2834 - RNA, 24 nt, Artificial Sequence
  miRNA Sequence
acuaagugccucagaaaccaaauu

SEQ ID NO: 2835 - RNA, 21 nt, Artificial Sequence
  miRNA Sequence
uacuuuucuagguuguugggg

SEQ ID NO: 2836 - RNA, 21 nt, Artificial Sequence
  miRNA Sequence
ccccaacaaccuagaaaagua

SEQ ID NO: 2837 - RNA, 23 nt, Artificial Sequence
  miRNA Sequence
ucacaacaaccuugcaggguaga

SEQ ID NO: 2838 - RNA, 23 nt, Artificial Sequence
  miRNA Sequence
ucuacccugcaagguuguuguga

SEQ ID NO: 2839 - RNA, 22 nt, Artificial Sequence
  miRNA Sequence
cuuggauuuuccugggccucag

SEQ ID NO: 2840 - RNA, 22 nt, Artificial Sequence
  miRNA Sequence
cugaggcccaggaaaauccaag

SEQ ID NO: 2841 - RNA, 22 nt, Artificial Sequence
  miRNA Sequence
ugaggacagggcaaauucacga

SEQ ID NO: 2842 - RNA, 22 nt, Artificial Sequence
  miRNA Sequence
ucgugaauuugcccuguccuca

SEQ ID NO: 2843 - RNA, 21 nt, Artificial Sequence
  miRNA Sequence
uuucccuuuccauccuggcag

SEQ ID NO: 2844 - RNA, 21 nt, Artificial Sequence
  miRNA Sequence
cugccaggauggaaagggaaa

SEQ ID NO: 2845 - RNA, 21 nt, Artificial Sequence
  miRNA Sequence
uugccagggcaggagguggaa

SEQ ID NO: 2846 - RNA, 21 nt, Artificial Sequence
  miRNA Sequence
uuccaccuccugcccuggcaa

SEQ ID NO: 2847 - RNA, 22 nt, Artificial Sequence
  miRNA Sequence
aucauaugaaccaaacucuaau

SEQ ID NO: 2848 - RNA, 22 nt, Artificial Sequence
  miRNA Sequence
auuagaguuugguucauaugau

SEQ ID NO: 2849 - RNA, 22 nt, Artificial Sequence
  miRNA Sequence
uagagucuggcugauaugguuu

SEQ ID NO: 2850 - RNA, 22 nt, Artificial Sequence
  miRNA Sequence
aaaccauaucagccagacucua

SEQ ID NO: 2851 - RNA, 21 nt, Artificial Sequence
  miRNA Sequence
ccugugcucccagggccucgc

SEQ ID NO: 2852 - RNA, 21 nt, Artificial Sequence
  miRNA Sequence
gcgaggcccugggagcacagg

SEQ ID NO: 2853 - RNA, 22 nt, Artificial Sequence
  miRNA Sequence
ugaggcccuuggggcacagugg

SEQ ID NO: 2854 - RNA, 22 nt, Artificial Sequence
  miRNA Sequence
ccacugugccccaagggccuca

SEQ ID NO: 2855 - RNA, 22 nt, Artificial Sequence
  miRNA Sequence
uccuaaaucugaaaguccaaaa

SEQ ID NO: 2856 - RNA, 22 nt, Artificial Sequence
  miRNA Sequence
uuuuggacuuucagauuuagga

SEQ ID NO: 2857 - RNA, 24 nt, Artificial Sequence
  miRNA Sequence
uuggacuuuuucagauuuggggau

SEQ ID NO: 2858 - RNA, 24 nt, Artificial Sequence
  miRNA Sequence
auccccaaaucugaaaaaguccaa

SEQ ID NO: 2859 - RNA, 22 nt, Artificial Sequence
  miRNA Sequence
augcaccugggcaaggauucug

SEQ ID NO: 2860 - RNA, 22 nt, Artificial Sequence
  miRNA Sequence
cagaauccuugcccaggugcau

SEQ ID NO: 2861 - RNA, 23 nt, Artificial Sequence
  miRNA Sequence
uaauccuugcuaccugggugaga

SEQ ID NO: 2862 - RNA, 23 nt, Artificial Sequence
  miRNA Sequence
ucucacccagguagcaaggauua

SEQ ID NO: 2863 - RNA, 18 nt, Artificial Sequence
  miRNA Sequence
aauccuugcuaccugggu

SEQ ID NO: 2864 - RNA, 18 nt, Artificial Sequence
  miRNA Sequence
acccagguagcaaggauu

SEQ ID NO: 2865 - RNA, 22 nt, Artificial Sequence
  miRNA Sequence
aaugcacccgggcaaggauucu

SEQ ID NO: 2866 - RNA, 22 nt, Artificial Sequence
  miRNA Sequence
agaauccuugcccgggugcauu

SEQ ID NO: 2867 - RNA, 22 nt, Artificial Sequence
  miRNA Sequence
aauccuuugucccugggugaga

SEQ ID NO: 2868 - RNA, 22 nt, Artificial Sequence
  miRNA Sequence
ucucacccagggacaaaggauu

SEQ ID NO: 2869 - RNA, 22 nt, Artificial Sequence
  miRNA Sequence
uuuugugucucccauuccccag

SEQ ID NO: 2870 - RNA, 22 nt, Artificial Sequence
  miRNA Sequence
cuggggaaugggagacacaaaa

SEQ ID NO: 2871 - RNA, 22 nt, Artificial Sequence
  miRNA Sequence
agggggauggcagagcaaaauu

SEQ ID NO: 2872 - RNA, 22 nt, Artificial Sequence
  miRNA Sequence
aauuuugcucugccaucccccu

SEQ ID NO: 2873 - RNA, 22 nt, Artificial Sequence
  miRNA Sequence
gugcauggcuguauauauaaca

SEQ ID NO: 2874 - RNA, 22 nt, Artificial Sequence
  miRNA Sequence
uguuauauauacagccaugcac

SEQ ID NO: 2875 - RNA, 21 nt, Artificial Sequence
  miRNA Sequence
uauauauacagccaugcacuc

SEQ ID NO: 2876 - RNA, 21 nt, Artificial Sequence
  miRNA Sequence
gagugcauggcuguauauaua

SEQ ID NO: 2877 - RNA, 22 nt, Artificial Sequence
  miRNA Sequence
aaugcaccugggcaaggauuca

SEQ ID NO: 2878 - RNA, 22 nt, Artificial Sequence
  miRNA Sequence
ugaauccuugcccaggugcauu

SEQ ID NO: 2879 - RNA, 21 nt, Artificial Sequence
  miRNA Sequence
auccuugcuaucugggugcua

SEQ ID NO: 2880 - RNA, 21 nt, Artificial Sequence
  miRNA Sequence
uagcacccagauagcaaggau

SEQ ID NO: 2881 - RNA, 23 nt, Artificial Sequence
  miRNA Sequence
uagcagcgggaacaguucugcag

SEQ ID NO: 2882 - RNA, 23 nt, Artificial Sequence
  miRNA Sequence
cugcagaacuguucccgcugcua

SEQ ID NO: 2883 - RNA, 22 nt, Artificial Sequence
  miRNA Sequence
agacccuggucugcacucuauc

SEQ ID NO: 2884 - RNA, 22 nt, Artificial Sequence
  miRNA Sequence
gauagagugcagaccagggucu

SEQ ID NO: 2885 - RNA, 21 nt, Artificial Sequence
  miRNA Sequence
uugcagcugcgguuguaaggu

SEQ ID NO: 2886 - RNA, 21 nt, Artificial Sequence
  miRNA Sequence
accuuacaaccgcagcugcaa

SEQ ID NO: 2887 - RNA, 22 nt, Artificial Sequence
  miRNA Sequence
cgucaacacuugcugguuuccu

SEQ ID NO: 2888 - RNA, 22 nt, Artificial Sequence
  miRNA Sequence
aggaaaccagcaaguguugacg

SEQ ID NO: 2889 - RNA, 22 nt, Artificial Sequence
  miRNA Sequence
gggagccaggaaguauugaugu

SEQ ID NO: 2890 - RNA, 22 nt, Artificial Sequence
  miRNA Sequence
acaucaauacuuccuggcuccc

SEQ ID NO: 2891 - RNA, 21 nt, Artificial Sequence
  miRNA Sequence
uaaggcacccuucugaguaga

SEQ ID NO: 2892 - RNA, 21 nt, Artificial Sequence
  miRNA Sequence
ucuacucagaagggugccuua

SEQ ID NO: 2893 - RNA, 22 nt, Artificial Sequence
  miRNA Sequence
uauucaggaagguguuacuuaa

SEQ ID NO: 2894 - RNA, 22 nt, Artificial Sequence
  miRNA Sequence
uuaaguaacaccuuccugaaua

SEQ ID NO: 2895 - RNA, 21 nt, Artificial Sequence
  miRNA Sequence
uuuugcaccuuuuggagugaa

SEQ ID NO: 2896 - RNA, 21 nt, Artificial Sequence
  miRNA Sequence
uucacuccaaaaggugcaaaa

SEQ ID NO: 2897 - RNA, 23 nt, Artificial Sequence
  miRNA Sequence
ugauuguagccuuuuggaguaga

SEQ ID NO: 2898 - RNA, 23 nt, Artificial Sequence
  miRNA Sequence
ucuacuccaaaaggcuacaauca

SEQ ID NO: 2899 - RNA, 23 nt, Artificial Sequence
  miRNA Sequence
uacuccagagggcgucacucaug

SEQ ID NO: 2900 - RNA, 23 nt, Artificial Sequence
  miRNA Sequence
caugagugacgcccucuggagua

SEQ ID NO: 2901 - RNA, 23 nt, Artificial Sequence
  miRNA Sequence
ggguuuguagcuuugcuggcaug

SEQ ID NO: 2902 - RNA, 23 nt, Artificial Sequence
  miRNA Sequence
caugccagcaaagcuacaaaccc

SEQ ID NO: 2903 - RNA, 23 nt, Artificial Sequence
  miRNA Sequence
cagggcucagggauuggauggag

SEQ ID NO: 2904 - RNA, 23 nt, Artificial Sequence
  miRNA Sequence
cuccauccaaucccugagcccug

SEQ ID NO: 2905 - RNA, 21 nt, Artificial Sequence
  miRNA Sequence
gugggauuucugaguagcauc

SEQ ID NO: 2906 - RNA, 21 nt, Artificial Sequence
  miRNA Sequence
gaugcuacucagaaaucccac

SEQ ID NO: 2907 - RNA, 22 nt, Artificial Sequence
  miRNA Sequence
uacugcagacguggcaaucaug

SEQ ID NO: 2908 - RNA, 22 nt, Artificial Sequence
  miRNA Sequence
caugauugccacgucugcagua

SEQ ID NO: 2909 - RNA, 22 nt, Artificial Sequence
  miRNA Sequence
ugauugguacgucuguggguag

SEQ ID NO: 2910 - RNA, 22 nt, Artificial Sequence
  miRNA Sequence
cuacccacagacguaccaauca

SEQ ID NO: 2911 - RNA, 21 nt, Artificial Sequence
  miRNA Sequence
uacugcagacaguggcaauca

SEQ ID NO: 2912 - RNA, 21 nt, Artificial Sequence
  miRNA Sequence
ugauugccacugucugcagua

SEQ ID NO: 2913 - RNA, 23 nt, Artificial Sequence
  miRNA Sequence
ccggggcagauugguguagggug

SEQ ID NO: 2914 - RNA, 23 nt, Artificial Sequence
  miRNA Sequence
cacccuacaccaaucugccccgg

SEQ ID NO: 2915 - RNA, 23 nt, Artificial Sequence
  miRNA Sequence
acggagacgacaagacugugcug

SEQ ID NO: 2916 - RNA, 23 nt, Artificial Sequence
  miRNA Sequence
cagcacagucuugucgucuccgu

SEQ ID NO: 2917 - RNA, 22 nt, Artificial Sequence
  miRNA Sequence
aauccacgcugagcuuggcauc

SEQ ID NO: 2918 - RNA, 22 nt, Artificial Sequence
  miRNA Sequence
gaugccaagcucagcguggauu

SEQ ID NO: 2919 - RNA, 23 nt, Artificial Sequence
  miRNA Sequence
aggaaaugaggcuggcuaggagc

SEQ ID NO: 2920 - RNA, 23 nt, Artificial Sequence
  miRNA Sequence
gcuccuagccagccucauuuccu

SEQ ID NO: 2921 - RNA, 22 nt, Artificial Sequence
  miRNA Sequence
aaucagugaaugccuugaaccu

SEQ ID NO: 2922 - RNA, 22 nt, Artificial Sequence
  miRNA Sequence
agguucaaggcauucacugauu

SEQ ID NO: 2923 - RNA, 21 nt, Artificial Sequence
  miRNA Sequence
uuacaggcgugaaccaccgcg

SEQ ID NO: 2924 - RNA, 21 nt, Artificial Sequence
  miRNA Sequence
cgcggugguucacgccuguaa

SEQ ID NO: 2925 - RNA, 21 nt, Artificial Sequence
  miRNA Sequence
guuucaccauguuggucaggc

SEQ ID NO: 2926 - RNA, 21 nt, Artificial Sequence
  miRNA Sequence
gccugaccaacauggugaaac

SEQ ID NO: 2927 - RNA, 22 nt, Artificial Sequence
  miRNA Sequence
uacucaggagaguggcaaucac

SEQ ID NO: 2928 - RNA, 22 nt, Artificial Sequence
  miRNA Sequence
gugauugccacucuccugagua

SEQ ID NO: 2929 - RNA, 22 nt, Artificial Sequence
  miRNA Sequence
uucagaucccagcggugccucu

SEQ ID NO: 2930 - RNA, 22 nt, Artificial Sequence
  miRNA Sequence
agaggcaccgcugggaucugaa

SEQ ID NO: 2931 - RNA, 21 nt, Artificial Sequence
  miRNA Sequence
gugucuuuugcucugcaguca

SEQ ID NO: 2932 - RNA, 21 nt, Artificial Sequence
  miRNA Sequence
ugacugcagagcaaaagacac

SEQ ID NO: 2933 - RNA, 22 nt, Artificial Sequence
  miRNA Sequence
aagugcugucauagcugagguc

SEQ ID NO: 2934 - RNA, 22 nt, Artificial Sequence
  miRNA Sequence
gaccucagcuaugacagcacuu

SEQ ID NO: 2935 - RNA, 23 nt, Artificial Sequence
  miRNA Sequence
cacucagccuugagggcacuuuc

SEQ ID NO: 2936 - RNA, 23 nt, Artificial Sequence
  miRNA Sequence
gaaagugcccucaaggcugagug

SEQ ID NO: 2937 - RNA, 23 nt, Artificial Sequence
  miRNA Sequence
uaaauuucaccuuucugagaagg

SEQ ID NO: 2938 - RNA, 23 nt, Artificial Sequence
  miRNA Sequence
ccuucucagaaaggugaaauuua

SEQ ID NO: 2939 - RNA, 18 nt, Artificial Sequence
  miRNA Sequence
uucacagggaggugucau

SEQ ID NO: 2940 - RNA, 18 nt, Artificial Sequence
  miRNA Sequence
augacaccucccugugaa

SEQ ID NO: 2941 - RNA, 22 nt, Artificial Sequence
  miRNA Sequence
uucacaaggaggugucauuuau

SEQ ID NO: 2942 - RNA, 22 nt, Artificial Sequence
  miRNA Sequence
auaaaugacaccuccuugugaa

SEQ ID NO: 2943 - RNA, 23 nt, Artificial Sequence
  miRNA Sequence
uaaauuucaccuuucugagaaga

SEQ ID NO: 2944 - RNA, 23 nt, Artificial Sequence
  miRNA Sequence
ucuucucagaaaggugaaauuua

SEQ ID NO: 2945 - RNA, 22 nt, Artificial Sequence
  miRNA Sequence
uucucaaggaggugucguuuau

SEQ ID NO: 2946 - RNA, 22 nt, Artificial Sequence
  miRNA Sequence
auaaacgacaccuccuugagaa

SEQ ID NO: 2947 - RNA, 21 nt, Artificial Sequence
  miRNA Sequence
auugacacuucugugaguaga

SEQ ID NO: 2948 - RNA, 21 nt, Artificial Sequence
  miRNA Sequence
ucuacucacagaagugucaau

SEQ ID NO: 2949 - RNA, 23 nt, Artificial Sequence
  miRNA Sequence
uacucuggagagugacaaucaug

SEQ ID NO: 2950 - RNA, 23 nt, Artificial Sequence
  miRNA Sequence
caugauugucacucuccagagua

SEQ ID NO: 2951 - RNA, 21 nt, Artificial Sequence
  miRNA Sequence
auugacaccucugugagugga

SEQ ID NO: 2952 - RNA, 21 nt, Artificial Sequence
  miRNA Sequence
uccacucacagaggugucaau

SEQ ID NO: 2953 - RNA, 22 nt, Artificial Sequence
  miRNA Sequence
uucucaagagggaggcaaucau

SEQ ID NO: 2954 - RNA, 22 nt, Artificial Sequence
  miRNA Sequence
augauugccucccucuugagaa

SEQ ID NO: 2955 - RNA, 22 nt, Artificial Sequence
  miRNA Sequence
gagugccuucuuuuggagcguu

SEQ ID NO: 2956 - RNA, 22 nt, Artificial Sequence
  miRNA Sequence
aacgcuccaaaagaaggcacuc

SEQ ID NO: 2957 - RNA, 24 nt, Artificial Sequence
  miRNA Sequence
uucuccaaaagaaagcacuuucug

SEQ ID NO: 2958 - RNA, 24 nt, Artificial Sequence
  miRNA Sequence
cagaaagugcuuucuuuuggagaa

SEQ ID NO: 2959 - RNA, 18 nt, Artificial Sequence
  miRNA Sequence
ugcuuccuuucagagggu

SEQ ID NO: 2960 - RNA, 18 nt, Artificial Sequence
  miRNA Sequence
acccucugaaaggaagca

SEQ ID NO: 2961 - RNA, 23 nt, Artificial Sequence
  miRNA Sequence
uucucgaggaaagaagcacuuuc

SEQ ID NO: 2962 - RNA, 23 nt, Artificial Sequence
  miRNA Sequence
gaaagugcuucuuuccucgagaa

SEQ ID NO: 2963 - RNA, 18 nt, Artificial Sequence
  miRNA Sequence
ugcuuccuuucagagggu

SEQ ID NO: 2964 - RNA, 18 nt, Artificial Sequence
  miRNA Sequence
acccucugaaaggaagca

SEQ ID NO: 2965 - RNA, 22 nt, Artificial Sequence
  miRNA Sequence
aucuggagguaagaagcacuuu

SEQ ID NO: 2966 - RNA, 22 nt, Artificial Sequence
  miRNA Sequence
aaagugcuucuuaccuccagau

SEQ ID NO: 2967 - RNA, 22 nt, Artificial Sequence
  miRNA Sequence
ccucuagauggaagcacugucu

SEQ ID NO: 2968 - RNA, 22 nt, Artificial Sequence
  miRNA Sequence
agacagugcuuccaucuagagg

SEQ ID NO: 2969 - RNA, 22 nt, Artificial Sequence
  miRNA Sequence
aucgugcaucccuuuagagugu

SEQ ID NO: 2970 - RNA, 22 nt, Artificial Sequence
  miRNA Sequence
acacucuaaagggaugcacgau

SEQ ID NO: 2971 - RNA, 22 nt, Artificial Sequence
  miRNA Sequence
aucgugcaucccuuuagagugu

SEQ ID NO: 2972 - RNA, 22 nt, Artificial Sequence
  miRNA Sequence
acacucuaaagggaugcacgau

SEQ ID NO: 2973 - RNA, 22 nt, Artificial Sequence
  miRNA Sequence
aucgugcauccuuuuagagugu

SEQ ID NO: 2974 - RNA, 22 nt, Artificial Sequence
  miRNA Sequence
acacucuaaaaggaugcacgau

SEQ ID NO: 2975 - RNA, 21 nt, Artificial Sequence
  miRNA Sequence
agagauugguagaaaucaggu

SEQ ID NO: 2976 - RNA, 21 nt, Artificial Sequence
  miRNA Sequence
accugauuucuaccaaucucu

SEQ ID NO: 2977 - RNA, 21 nt, Artificial Sequence
  miRNA Sequence
acugaauccucuuuuccucag

SEQ ID NO: 2978 - RNA, 21 nt, Artificial Sequence
  miRNA Sequence
cugaggaaaagaggauucagu

SEQ ID NO: 2979 - RNA, 22 nt, Artificial Sequence
  miRNA Sequence
ugggaugagggauugaagugga

SEQ ID NO: 2980 - RNA, 22 nt, Artificial Sequence
  miRNA Sequence
uccacuucaaucccucauccca

SEQ ID NO: 2981 - RNA, 23 nt, Artificial Sequence
  miRNA Sequence
aaucggacccauuuaaaccggag

SEQ ID NO: 2982 - RNA, 23 nt, Artificial Sequence
  miRNA Sequence
cuccgguuuaaauggguccgauu

SEQ ID NO: 2983 - RNA, 24 nt, Artificial Sequence
  miRNA Sequence
ucugggcacaggcggauggacagg

SEQ ID NO: 2984 - RNA, 24 nt, Artificial Sequence
  miRNA Sequence
ccuguccauccgccugugcccaga

SEQ ID NO: 2985 - RNA, 22 nt, Artificial Sequence
  miRNA Sequence
gaaagcgcuucccuuugcugga

SEQ ID NO: 2986 - RNA, 22 nt, Artificial Sequence
  miRNA Sequence
uccagcaaagggaagcgcuuuc

SEQ ID NO: 2987 - RNA, 20 nt, Artificial Sequence
  miRNA Sequence
cugcaaagggaagcccuuuc

SEQ ID NO: 2988 - RNA, 20 nt, Artificial Sequence
  miRNA Sequence
gaaagggcuucccuuugcag

SEQ ID NO: 2989 - RNA, 22 nt, Artificial Sequence
  miRNA Sequence
caaagcgcuccccuuuagaggu

SEQ ID NO: 2990 - RNA, 22 nt, Artificial Sequence
  miRNA Sequence
accucuaaaggggagcgcuuug

SEQ ID NO: 2991 - RNA, 23 nt, Artificial Sequence
  miRNA Sequence
caaagcgcuucucuuuagagugu

SEQ ID NO: 2992 - RNA, 23 nt, Artificial Sequence
  miRNA Sequence
acacucuaaagagaagcgcuuug

SEQ ID NO: 2993 - RNA, 23 nt, Artificial Sequence
  miRNA Sequence
ucucuggagggaagcacuuucug

SEQ ID NO: 2994 - RNA, 23 nt, Artificial Sequence
  miRNA Sequence
cagaaagugcuucccuccagaga

SEQ ID NO: 2995 - RNA, 21 nt, Artificial Sequence
  miRNA Sequence
caaagcgcuucccuuuggagc

SEQ ID NO: 2996 - RNA, 21 nt, Artificial Sequence
  miRNA Sequence
gcuccaaagggaagcgcuuug

SEQ ID NO: 2997 - RNA, 22 nt, Artificial Sequence
  miRNA Sequence
cucuagagggaagcacuuucug

SEQ ID NO: 2998 - RNA, 22 nt, Artificial Sequence
  miRNA Sequence
cagaaagugcuucccucuagag

SEQ ID NO: 2999 - RNA, 21 nt, Artificial Sequence
  miRNA Sequence
aaagcgcuucccuucagagug

SEQ ID NO: 3000 - RNA, 21 nt, Artificial Sequence
  miRNA Sequence
cacucugaagggaagcgcuuu

SEQ ID NO: 3001 - RNA, 22 nt, Artificial Sequence
  miRNA Sequence
cucuagagggaagcgcuuucug

SEQ ID NO: 3002 - RNA, 22 nt, Artificial Sequence
  miRNA Sequence
cagaaagcgcuucccucuagag

SEQ ID NO: 3003 - RNA, 21 nt, Artificial Sequence
  miRNA Sequence
gaaagcgcuucucuuuagagg

SEQ ID NO: 3004 - RNA, 21 nt, Artificial Sequence
  miRNA Sequence
ccucuaaagagaagcgcuuuc

SEQ ID NO: 3005 - RNA, 22 nt, Artificial Sequence
  miRNA Sequence
cucuagagggaagcacuuucuc

SEQ ID NO: 3006 - RNA, 22 nt, Artificial Sequence
  miRNA Sequence
gagaaagugcuucccucuagag

SEQ ID NO: 3007 - RNA, 21 nt, Artificial Sequence
  miRNA Sequence
ccagugacugagcuggagcca

SEQ ID NO: 3008 - RNA, 21 nt, Artificial Sequence
  miRNA Sequence
uggcuccagcucagucacugg

SEQ ID NO: 3009 - RNA, 22 nt, Artificial Sequence
  miRNA Sequence
aggauaggaagaaugaagugcu

SEQ ID NO: 3010 - RNA, 22 nt, Artificial Sequence
  miRNA Sequence
agcacuucauucuuccuauccu

SEQ ID NO: 3011 - RNA, 22 nt, Artificial Sequence
  miRNA Sequence
aggagaguggauuccagguggu

SEQ ID NO: 3012 - RNA, 22 nt, Artificial Sequence
  miRNA Sequence
accaccuggaauccacucuccu

SEQ ID NO: 3013 - RNA, 22 nt, Artificial Sequence
  miRNA Sequence
uccuccucuaccucaucccagu

SEQ ID NO: 3014 - RNA, 22 nt, Artificial Sequence
  miRNA Sequence
acugggaugagguagaggagga

SEQ ID NO: 3015 - RNA, 22 nt, Artificial Sequence
  miRNA Sequence
ugagggguuuggaaugggaugg

SEQ ID NO: 3016 - RNA, 22 nt, Artificial Sequence
  miRNA Sequence
ccaucccauuccaaaccccuca

SEQ ID NO: 3017 - RNA, 21 nt, Artificial Sequence
  miRNA Sequence
auccaguucucugagggggcu

SEQ ID NO: 3018 - RNA, 21 nt, Artificial Sequence
  miRNA Sequence
agcccccucagagaacuggau

SEQ ID NO: 3019 - RNA, 22 nt, Artificial Sequence
  miRNA Sequence
aaccccuaaggcaacuggaugg

SEQ ID NO: 3020 - RNA, 22 nt, Artificial Sequence
  miRNA Sequence
ccauccaguugccuuagggguu

SEQ ID NO: 3021 - RNA, 21 nt, Artificial Sequence
  miRNA Sequence
ucauccucgucucccucccag

SEQ ID NO: 3022 - RNA, 21 nt, Artificial Sequence
  miRNA Sequence
cugggagggagacgaggauga

SEQ ID NO: 3023 - RNA, 22 nt, Artificial Sequence
  miRNA Sequence
agggaaggggacgaggguuggg

SEQ ID NO: 3024 - RNA, 22 nt, Artificial Sequence
  miRNA Sequence
cccaacccucguccccuucccu

SEQ ID NO: 3025 - RNA, 23 nt, Artificial Sequence
  miRNA Sequence
aagaagagacugagucaucgaau

SEQ ID NO: 3026 - RNA, 23 nt, Artificial Sequence
  miRNA Sequence
auucgaugacucagucucuucuu

SEQ ID NO: 3027 - RNA, 23 nt, Artificial Sequence
  miRNA Sequence
caauggcacaaacucauucuuga

SEQ ID NO: 3028 - RNA, 23 nt, Artificial Sequence
  miRNA Sequence
ucaagaaugaguuugugccauug

SEQ ID NO: 3029 - RNA, 22 nt, Artificial Sequence
  miRNA Sequence
aaagugcauccuuuuagagugu

SEQ ID NO: 3030 - RNA, 22 nt, Artificial Sequence
  miRNA Sequence
acacucuaaaaggaugcacuuu

SEQ ID NO: 3031 - RNA, 22 nt, Artificial Sequence
  miRNA Sequence
cucuagagggaagcgcuuucug

SEQ ID NO: 3032 - RNA, 22 nt, Artificial Sequence
  miRNA Sequence
cagaaagcgcuucccucuagag

SEQ ID NO: 3033 - RNA, 22 nt, Artificial Sequence
  miRNA Sequence
aaagugcauccuuuuagagguu

SEQ ID NO: 3034 - RNA, 22 nt, Artificial Sequence
  miRNA Sequence
aaccucuaaaaggaugcacuuu

SEQ ID NO: 3035 - RNA, 22 nt, Artificial Sequence
  miRNA Sequence
cucuagagggaagcgcuuucug

SEQ ID NO: 3036 - RNA, 22 nt, Artificial Sequence
  miRNA Sequence
cagaaagcgcuucccucuagag

SEQ ID NO: 3037 - RNA, 22 nt, Artificial Sequence
  miRNA Sequence
aaagugcaucuuuuuagaggau

SEQ ID NO: 3038 - RNA, 22 nt, Artificial Sequence
  miRNA Sequence
auccucuaaaaagaugcacuuu

SEQ ID NO: 3039 - RNA, 22 nt, Artificial Sequence
  miRNA Sequence
cucuagagggaagcgcuuucug

SEQ ID NO: 3040 - RNA, 22 nt, Artificial Sequence
  miRNA Sequence
cagaaagcgcuucccucuagag

SEQ ID NO: 3041 - RNA, 22 nt, Artificial Sequence
  miRNA Sequence
caaagugccucccuuuagagug

SEQ ID NO: 3042 - RNA, 22 nt, Artificial Sequence
  miRNA Sequence
cacucuaaagggaggcacuuug

SEQ ID NO: 3043 - RNA, 22 nt, Artificial Sequence
  miRNA Sequence
aagugccuccuuuuagaguguu

SEQ ID NO: 3044 - RNA, 22 nt, Artificial Sequence
  miRNA Sequence
aacacucuaaaaggaggcacuu

SEQ ID NO: 3045 - RNA, 22 nt, Artificial Sequence
  miRNA Sequence
uucuccaaaagggagcacuuuc

SEQ ID NO: 3046 - RNA, 22 nt, Artificial Sequence
  miRNA Sequence
gaaagugcucccuuuuggagaa

SEQ ID NO: 3047 - RNA, 22 nt, Artificial Sequence
  miRNA Sequence
aaagugcuucccuuuggacugu

SEQ ID NO: 3048 - RNA, 22 nt, Artificial Sequence
  miRNA Sequence
acaguccaaagggaagcacuuu

SEQ ID NO: 3049 - RNA, 21 nt, Artificial Sequence
  miRNA Sequence
cuccagagggaaguacuuucu

SEQ ID NO: 3050 - RNA, 21 nt, Artificial Sequence
  miRNA Sequence
agaaaguacuucccucuggag

SEQ ID NO: 3051 - RNA, 21 nt, Artificial Sequence
  miRNA Sequence
aaagugcuuccuuuuagaggg

SEQ ID NO: 3052 - RNA, 21 nt, Artificial Sequence
  miRNA Sequence
cccucuaaaaggaagcacuuu

SEQ ID NO: 3053 - RNA, 22 nt, Artificial Sequence
  miRNA Sequence
aaagugcuuccuuuuagagggu

SEQ ID NO: 3054 - RNA, 22 nt, Artificial Sequence
  miRNA Sequence
acccucuaaaaggaagcacuuu

SEQ ID NO: 3055 - RNA, 22 nt, Artificial Sequence
  miRNA Sequence
cucuagagggaagcacuuucug

SEQ ID NO: 3056 - RNA, 22 nt, Artificial Sequence
  miRNA Sequence
cagaaagugcuucccucuagag

SEQ ID NO: 3057 - RNA, 22 nt, Artificial Sequence
  miRNA Sequence
aaagugcuucucuuuggugggu

SEQ ID NO: 3058 - RNA, 22 nt, Artificial Sequence
  miRNA Sequence
acccaccaaagagaagcacuuu

SEQ ID NO: 3059 - RNA, 20 nt, Artificial Sequence
  miRNA Sequence
cuacaaagggaagcccuuuc

SEQ ID NO: 3060 - RNA, 20 nt, Artificial Sequence
  miRNA Sequence
gaaagggcuucccuuuguag

SEQ ID NO: 3061 - RNA, 21 nt, Artificial Sequence
  miRNA Sequence
aaagugcuuccuuuuugaggg

SEQ ID NO: 3062 - RNA, 21 nt, Artificial Sequence
  miRNA Sequence
cccucaaaaaggaagcacuuu

SEQ ID NO: 3063 - RNA, 22 nt, Artificial Sequence
  miRNA Sequence
aagugcuuccuuuuagaggguu

SEQ ID NO: 3064 - RNA, 22 nt, Artificial Sequence
  miRNA Sequence
aacccucuaaaaggaagcacuu

SEQ ID NO: 3065 - RNA, 24 nt, Artificial Sequence
  miRNA Sequence
acaaagugcuucccuuuagagugu

SEQ ID NO: 3066 - RNA, 24 nt, Artificial Sequence
  miRNA Sequence
acacucuaaagggaagcacuuugu

SEQ ID NO: 3067 - RNA, 22 nt, Artificial Sequence
  miRNA Sequence
acaaagugcuucccuuuagagu

SEQ ID NO: 3068 - RNA, 22 nt, Artificial Sequence
  miRNA Sequence
acucuaaagggaagcacuuugu

SEQ ID NO: 3069 - RNA, 22 nt, Artificial Sequence
  miRNA Sequence
aacgcacuucccuuuagagugu

SEQ ID NO: 3070 - RNA, 22 nt, Artificial Sequence
  miRNA Sequence
acacucuaaagggaagugcguu

SEQ ID NO: 3071 - RNA, 22 nt, Artificial Sequence
  miRNA Sequence
aaaaugguucccuuuagagugu

SEQ ID NO: 3072 - RNA, 22 nt, Artificial Sequence
  miRNA Sequence
acacucuaaagggaaccauuuu

SEQ ID NO: 3073 - RNA, 22 nt, Artificial Sequence
  miRNA Sequence
cucuagagggaagcgcuuucug

SEQ ID NO: 3074 - RNA, 22 nt, Artificial Sequence
  miRNA Sequence
cagaaagcgcuucccucuagag

SEQ ID NO: 3075 - RNA, 23 nt, Artificial Sequence
  miRNA Sequence
gaacgcgcuucccuauagagggu

SEQ ID NO: 3076 - RNA, 23 nt, Artificial Sequence
  miRNA Sequence
acccucuauagggaagcgcguuc

SEQ ID NO: 3077 - RNA, 22 nt, Artificial Sequence
  miRNA Sequence
cucuagagggaagcgcuuucug

SEQ ID NO: 3078 - RNA, 22 nt, Artificial Sequence
  miRNA Sequence
cagaaagcgcuucccucuagag

SEQ ID NO: 3079 - RNA, 21 nt, Artificial Sequence
  miRNA Sequence
gaaggcgcuucccuuuggagu

SEQ ID NO: 3080 - RNA, 21 nt, Artificial Sequence
  miRNA Sequence
acuccaaagggaagcgccuuc

SEQ ID NO: 3081 - RNA, 22 nt, Artificial Sequence
  miRNA Sequence
cuacaaagggaagcacuuucuc

SEQ ID NO: 3082 - RNA, 22 nt, Artificial Sequence
  miRNA Sequence
gagaaagugcuucccuuuguag

SEQ ID NO: 3083 - RNA, 22 nt, Artificial Sequence
  miRNA Sequence
gaaggcgcuucccuuuagagcg

SEQ ID NO: 3084 - RNA, 22 nt, Artificial Sequence
  miRNA Sequence
cgcucuaaagggaagcgccuuc

SEQ ID NO: 3085 - RNA, 21 nt, Artificial Sequence
  miRNA Sequence
cuccagagggaugcacuuucu

SEQ ID NO: 3086 - RNA, 21 nt, Artificial Sequence
  miRNA Sequence
agaaagugcaucccucuggag

SEQ ID NO: 3087 - RNA, 22 nt, Artificial Sequence
  miRNA Sequence
cucuagagggaagcacuuucug

SEQ ID NO: 3088 - RNA, 22 nt, Artificial Sequence
  miRNA Sequence
cagaaagugcuucccucuagag

SEQ ID NO: 3089 - RNA, 22 nt, Artificial Sequence
  miRNA Sequence
gaaagugcuuccuuuuagaggc

SEQ ID NO: 3090 - RNA, 22 nt, Artificial Sequence
  miRNA Sequence
gccucuaaaaggaagcacuuuc

SEQ ID NO: 3091 - RNA, 23 nt, Artificial Sequence
  miRNA Sequence
cucuugagggaagcacuuucugu

SEQ ID NO: 3092 - RNA, 23 nt, Artificial Sequence
  miRNA Sequence
acagaaagugcuucccucaagag

SEQ ID NO: 3093 - RNA, 20 nt, Artificial Sequence
  miRNA Sequence
cugcaaagggaagcccuuuc

SEQ ID NO: 3094 - RNA, 20 nt, Artificial Sequence
  miRNA Sequence
gaaagggcuucccuuugcag

SEQ ID NO: 3095 - RNA, 22 nt, Artificial Sequence
  miRNA Sequence
ccucccacacccaaggcuugca

SEQ ID NO: 3096 - RNA, 22 nt, Artificial Sequence
  miRNA Sequence
ugcaagccuugggugugggagg

SEQ ID NO: 3097 - RNA, 22 nt, Artificial Sequence
  miRNA Sequence
caugccuugaguguaggaccgu

SEQ ID NO: 3098 - RNA, 22 nt, Artificial Sequence
  miRNA Sequence
acgguccuacacucaaggcaug

SEQ ID NO: 3099 - RNA, 22 nt, Artificial Sequence
  miRNA Sequence
aucauacaaggacaauuucuuu

SEQ ID NO: 3100 - RNA, 22 nt, Artificial Sequence
  miRNA Sequence
aaagaaauuguccuuguaugau

SEQ ID NO: 3101 - RNA, 22 nt, Artificial Sequence
  miRNA Sequence
ggagaaauuauccuuggugugu

SEQ ID NO: 3102 - RNA, 22 nt, Artificial Sequence
  miRNA Sequence
acacaccaaggauaauuucucc

SEQ ID NO: 3103 - RNA, 22 nt, Artificial Sequence
  miRNA Sequence
uggugggcacagaaucuggacu

SEQ ID NO: 3104 - RNA, 22 nt, Artificial Sequence
  miRNA Sequence
aguccagauucugugcccacca

SEQ ID NO: 3105 - RNA, 25 nt, Artificial Sequence
  miRNA Sequence
aaaggauucugcugucggucccacu

SEQ ID NO: 3106 - RNA, 25 nt, Artificial Sequence
  miRNA Sequence
agugggaccgacagcagaauccuuu

SEQ ID NO: 3107 - RNA, 22 nt, Artificial Sequence
  miRNA Sequence
ugugacagauugauaacugaaa

SEQ ID NO: 3108 - RNA, 22 nt, Artificial Sequence
  miRNA Sequence
uuucaguuaucaaucugucaca

SEQ ID NO: 3109 - RNA, 23 nt, Artificial Sequence
  miRNA Sequence
ucggggaucaucaugucacgaga

SEQ ID NO: 3110 - RNA, 23 nt, Artificial Sequence
  miRNA Sequence
ucucgugacaugaugauccccga

SEQ ID NO: 3111 - RNA, 22 nt, Artificial Sequence
  miRNA Sequence
aaacauucgcggugcacuucuu

SEQ ID NO: 3112 - RNA, 22 nt, Artificial Sequence
  miRNA Sequence
aagaagugcaccgcgaauguuu

SEQ ID NO: 3113 - RNA, 22 nt, Artificial Sequence
  miRNA Sequence
auucugcauuuuuagcaaguuc

SEQ ID NO: 3114 - RNA, 22 nt, Artificial Sequence
  miRNA Sequence
gaacuugcuaaaaaugcagaau

SEQ ID NO: 3115 - RNA, 22 nt, Artificial Sequence
  miRNA Sequence
accugagguugugcauuucuaa

SEQ ID NO: 3116 - RNA, 22 nt, Artificial Sequence
  miRNA Sequence
uuagaaaugcacaaccucaggu

SEQ ID NO: 3117 - RNA, 22 nt, Artificial Sequence
  miRNA Sequence
ucagcaaacauuuauugugugc

SEQ ID NO: 3118 - RNA, 22 nt, Artificial Sequence
  miRNA Sequence
gcacacaauaaauguuugcuga

SEQ ID NO: 3119 - RNA, 22 nt, Artificial Sequence
  miRNA Sequence
ucaguaaauguuuauuagauga

SEQ ID NO: 3120 - RNA, 22 nt, Artificial Sequence
  miRNA Sequence
ucaucuaauaaacauuuacuga

SEQ ID NO: 3121 - RNA, 22 nt, Artificial Sequence
  miRNA Sequence
caaaacuggcaauuacuuuugc

SEQ ID NO: 3122 - RNA, 22 nt, Artificial Sequence
  miRNA Sequence
gcaaaaguaauugccaguuuug

SEQ ID NO: 3123 - RNA, 22 nt, Artificial Sequence
  miRNA Sequence
aaaaguaauugcgaguuuuacc

SEQ ID NO: 3124 - RNA, 22 nt, Artificial Sequence
  miRNA Sequence
gguaaaacucgcaauuacuuuu

SEQ ID NO: 3125 - RNA, 25 nt, Artificial Sequence
  miRNA Sequence
aaaaaccacaauuacuuuugcacca

SEQ ID NO: 3126 - RNA, 25 nt, Artificial Sequence
  miRNA Sequence
uggugcaaaaguaauugugguuuuu

SEQ ID NO: 3127 - RNA, 22 nt, Artificial Sequence
  miRNA Sequence
aaaaguaauuguggauuuugcu

SEQ ID NO: 3128 - RNA, 22 nt, Artificial Sequence
  miRNA Sequence
agcaaaauccacaauuacuuuu

SEQ ID NO: 3129 - RNA, 22 nt, Artificial Sequence
  miRNA Sequence
caaaaaccggcaauuacuuuug

SEQ ID NO: 3130 - RNA, 22 nt, Artificial Sequence
  miRNA Sequence
caaaaguaauugccgguuuuug

SEQ ID NO: 3131 - RNA, 22 nt, Artificial Sequence
  miRNA Sequence
gaaaacgacaaugacuuuugca

SEQ ID NO: 3132 - RNA, 22 nt, Artificial Sequence
  miRNA Sequence
ugcaaaagucauugucguuuuc

SEQ ID NO: 3133 - RNA, 21 nt, Artificial Sequence
  miRNA Sequence
caaaaacugcaauuacuuuca

SEQ ID NO: 3134 - RNA, 21 nt, Artificial Sequence
  miRNA Sequence
ugaaaguaauugcaguuuuug

SEQ ID NO: 3135 - RNA, 21 nt, Artificial Sequence
  miRNA Sequence
aaagguaauugugguuucugc

SEQ ID NO: 3136 - RNA, 21 nt, Artificial Sequence
  miRNA Sequence
gcagaaaccacaauuaccuuu

SEQ ID NO: 3137 - RNA, 22 nt, Artificial Sequence
  miRNA Sequence
caaaaacugcaguuacuuuugc

SEQ ID NO: 3138 - RNA, 22 nt, Artificial Sequence
  miRNA Sequence
gcaaaaguaacugcaguuuuug

SEQ ID NO: 3139 - RNA, 20 nt, Artificial Sequence
  miRNA Sequence
aaaagugauugcaguguuug

SEQ ID NO: 3140 - RNA, 20 nt, Artificial Sequence
  miRNA Sequence
caaacacugcaaucacuuuu

SEQ ID NO: 3141 - RNA, 22 nt, Artificial Sequence
  miRNA Sequence
aaagguaauugcaguuuuuccc

SEQ ID NO: 3142 - RNA, 22 nt, Artificial Sequence
  miRNA Sequence
gggaaaaacugcaauuaccuuu

SEQ ID NO: 3143 - RNA, 21 nt, Artificial Sequence
  miRNA Sequence
uaaaaacugcaauuacuuuua

SEQ ID NO: 3144 - RNA, 21 nt, Artificial Sequence
  miRNA Sequence
uaaaaguaauugcaguuuuua

SEQ ID NO: 3145 - RNA, 23 nt, Artificial Sequence
  miRNA Sequence
ugcaaaaguaauugcaguuuuug

SEQ ID NO: 3146 - RNA, 23 nt, Artificial Sequence
  miRNA Sequence
caaaaacugcaauuacuuuugca

SEQ ID NO: 3147 - RNA, 21 nt, Artificial Sequence
  miRNA Sequence
aaaaguaacugcgguuuuuga

SEQ ID NO: 3148 - RNA, 21 nt, Artificial Sequence
  miRNA Sequence
ucaaaaaccgcaguuacuuuu

SEQ ID NO: 3149 - RNA, 22 nt, Artificial Sequence
  miRNA Sequence
aacggcaaugacuuuuguacca

SEQ ID NO: 3150 - RNA, 22 nt, Artificial Sequence
  miRNA Sequence
ugguacaaaagucauugccguu

SEQ ID NO: 3151 - RNA, 22 nt, Artificial Sequence
  miRNA Sequence
caaaaacugcaguuacuuuugu

SEQ ID NO: 3152 - RNA, 22 nt, Artificial Sequence
  miRNA Sequence
acaaaaguaacugcaguuuuug

SEQ ID NO: 3153 - RNA, 22 nt, Artificial Sequence
  miRNA Sequence
aaaaguaauugcgguuuuugcc

SEQ ID NO: 3154 - RNA, 22 nt, Artificial Sequence
  miRNA Sequence
ggcaaaaaccgcaauuacuuuu

SEQ ID NO: 3155 - RNA, 20 nt, Artificial Sequence
  miRNA Sequence
aaaaggcauugugguuuuug

SEQ ID NO: 3156 - RNA, 20 nt, Artificial Sequence
  miRNA Sequence
caaaaaccacaaugccuuuu

SEQ ID NO: 3157 - RNA, 22 nt, Artificial Sequence
  miRNA Sequence
aaagaccgugacuacuuuugca

SEQ ID NO: 3158 - RNA, 22 nt, Artificial Sequence
  miRNA Sequence
ugcaaaaguagucacggucuuu

SEQ ID NO: 3159 - RNA, 22 nt, Artificial Sequence
  miRNA Sequence
agaaguaacuacgguuuuugca

SEQ ID NO: 3160 - RNA, 22 nt, Artificial Sequence
  miRNA Sequence
ugcaaaaaccguaguuacuucu

SEQ ID NO: 3161 - RNA, 19 nt, Artificial Sequence
  miRNA Sequence
aaaaaccacaauuacuuuu

SEQ ID NO: 3162 - RNA, 19 nt, Artificial Sequence
  miRNA Sequence
aaaaguaauugugguuuuu

SEQ ID NO: 3163 - RNA, 19 nt, Artificial Sequence
  miRNA Sequence
aaaaguaauugcggucuuu

SEQ ID NO: 3164 - RNA, 19 nt, Artificial Sequence
  miRNA Sequence
aaagaccgcaauuacuuuu

SEQ ID NO: 3165 - RNA, 22 nt, Artificial Sequence
  miRNA Sequence
caaaaacugcaauuacuuuugc

SEQ ID NO: 3166 - RNA, 22 nt, Artificial Sequence
  miRNA Sequence
gcaaaaguaauugcaguuuuug

SEQ ID NO: 3167 - RNA, 22 nt, Artificial Sequence
  miRNA Sequence
gaaaguaauugcuguuuuugcc

SEQ ID NO: 3168 - RNA, 22 nt, Artificial Sequence
  miRNA Sequence
ggcaaaaacagcaauuacuuuc

SEQ ID NO: 3169 - RNA, 21 nt, Artificial Sequence
  miRNA Sequence
uaaaacugcaguuauuuuugc

SEQ ID NO: 3170 - RNA, 21 nt, Artificial Sequence
  miRNA Sequence
gcaaaaauaacugcaguuuua

SEQ ID NO: 3171 - RNA, 21 nt, Artificial Sequence
  miRNA Sequence
aaaaguaauugcaguuuuugc

SEQ ID NO: 3172 - RNA, 21 nt, Artificial Sequence
  miRNA Sequence
gcaaaaacugcaauuacuuuu

SEQ ID NO: 3173 - RNA, 22 nt, Artificial Sequence
  miRNA Sequence
uaaaacccacaauuauguuugu

SEQ ID NO: 3174 - RNA, 22 nt, Artificial Sequence
  miRNA Sequence
acaaacauaauuguggguuuua

SEQ ID NO: 3175 - RNA, 22 nt, Artificial Sequence
  miRNA Sequence
aaaaguaauugcggguuuugcc

SEQ ID NO: 3176 - RNA, 22 nt, Artificial Sequence
  miRNA Sequence
ggcaaaacccgcaauuacuuuu

SEQ ID NO: 3177 - RNA, 21 nt, Artificial Sequence
  miRNA Sequence
caaaaccgcaguaacuuuugu

SEQ ID NO: 3178 - RNA, 21 nt, Artificial Sequence
  miRNA Sequence
acaaaaguuacugcgguuuug

SEQ ID NO: 3179 - RNA, 22 nt, Artificial Sequence
  miRNA Sequence
aaaaguuauugcgguuuuggcu

SEQ ID NO: 3180 - RNA, 22 nt, Artificial Sequence
  miRNA Sequence
agccaaaaccgcaauaacuuuu

SEQ ID NO: 3181 - RNA, 21 nt, Artificial Sequence
  miRNA Sequence
uggcaguuacuuuugcaccag

SEQ ID NO: 3182 - RNA, 21 nt, Artificial Sequence
  miRNA Sequence
cuggugcaaaaguaacugcca

SEQ ID NO: 3183 - RNA, 21 nt, Artificial Sequence
  miRNA Sequence
aaaaguaauugcgguuuuugc

SEQ ID NO: 3184 - RNA, 21 nt, Artificial Sequence
  miRNA Sequence
gcaaaaaccgcaauuacuuuu

SEQ ID NO: 3185 - RNA, 20 nt, Artificial Sequence
  miRNA Sequence
aaaacugcaguuacuuuugc

SEQ ID NO: 3186 - RNA, 20 nt, Artificial Sequence
  miRNA Sequence
gcaaaaguaacugcaguuuu

SEQ ID NO: 3187 - RNA, 18 nt, Artificial Sequence
  miRNA Sequence
aaaaguacuugcggauuu

SEQ ID NO: 3188 - RNA, 18 nt, Artificial Sequence
  miRNA Sequence
aaauccgcaaguacuuuu

SEQ ID NO: 3189 - RNA, 20 nt, Artificial Sequence
  miRNA Sequence
gugcaaaagucaucacgguu

SEQ ID NO: 3190 - RNA, 20 nt, Artificial Sequence
  miRNA Sequence
aaccgugaugacuuuugcac

SEQ ID NO: 3191 - RNA, 22 nt, Artificial Sequence
  miRNA Sequence
agaaguaauugcgguuuugcca

SEQ ID NO: 3192 - RNA, 22 nt, Artificial Sequence
  miRNA Sequence
uggcaaaaccgcaauuacuucu

SEQ ID NO: 3193 - RNA, 22 nt, Artificial Sequence
  miRNA Sequence
caagaaccucaguugcuuuugu

SEQ ID NO: 3194 - RNA, 22 nt, Artificial Sequence
  miRNA Sequence
acaaaagcaacugagguucuug

SEQ ID NO: 3195 - RNA, 22 nt, Artificial Sequence
  miRNA Sequence
aaaaguaauugugguuuuggcc

SEQ ID NO: 3196 - RNA, 22 nt, Artificial Sequence
  miRNA Sequence
ggccaaaaccacaauuacuuuu

SEQ ID NO: 3197 - RNA, 22 nt, Artificial Sequence
  miRNA Sequence
caaaaaucucaauuacuuuugc

SEQ ID NO: 3198 - RNA, 22 nt, Artificial Sequence
  miRNA Sequence
gcaaaaguaauugagauuuuug

SEQ ID NO: 3199 - RNA, 22 nt, Artificial Sequence
  miRNA Sequence
aaaaguaauugcgguuuuugcc

SEQ ID NO: 3200 - RNA, 22 nt, Artificial Sequence
  miRNA Sequence
ggcaaaaaccgcaauuacuuuu

SEQ ID NO: 3201 - RNA, 22 nt, Artificial Sequence
  miRNA Sequence
caaaaaccacaguuucuuuugc

SEQ ID NO: 3202 - RNA, 22 nt, Artificial Sequence
  miRNA Sequence
gcaaaagaaacugugguuuuug

SEQ ID NO: 3203 - RNA, 22 nt, Artificial Sequence
  miRNA Sequence
aaaaguaauugugguuuuugcc

SEQ ID NO: 3204 - RNA, 22 nt, Artificial Sequence
  miRNA Sequence
ggcaaaaaccacaauuacuuuu

SEQ ID NO: 3205 - RNA, 22 nt, Artificial Sequence
  miRNA Sequence
aaaaacugagacuacuuuugca

SEQ ID NO: 3206 - RNA, 22 nt, Artificial Sequence
  miRNA Sequence
ugcaaaaguagucucaguuuuu

SEQ ID NO: 3207 - RNA, 19 nt, Artificial Sequence
  miRNA Sequence
aaaaacuguaauuacuuuu

SEQ ID NO: 3208 - RNA, 19 nt, Artificial Sequence
  miRNA Sequence
aaaaguaauuacaguuuuu

SEQ ID NO: 3209 - RNA, 22 nt, Artificial Sequence
  miRNA Sequence
aaaacuguaauuacuuuuguac

SEQ ID NO: 3210 - RNA, 22 nt, Artificial Sequence
  miRNA Sequence
guacaaaaguaauuacaguuuu

SEQ ID NO: 3211 - RNA, 23 nt, Artificial Sequence
  miRNA Sequence
ugcaaaaguaauugcaguuuuug

SEQ ID NO: 3212 - RNA, 23 nt, Artificial Sequence
  miRNA Sequence
caaaaacugcaauuacuuuugca

SEQ ID NO: 3213 - RNA, 23 nt, Artificial Sequence
  miRNA Sequence
caaaaaccgcaauuacuuuugca

SEQ ID NO: 3214 - RNA, 23 nt, Artificial Sequence
  miRNA Sequence
ugcaaaaguaauugcgguuuuug

SEQ ID NO: 3215 - RNA, 22 nt, Artificial Sequence
  miRNA Sequence
aaaaguaaucgcgguuuuuguc

SEQ ID NO: 3216 - RNA, 22 nt, Artificial Sequence
  miRNA Sequence
gacaaaaaccgcgauuacuuuu

SEQ ID NO: 3217 - RNA, 22 nt, Artificial Sequence
  miRNA Sequence
aaaaguaauugcggauuuugcc

SEQ ID NO: 3218 - RNA, 22 nt, Artificial Sequence
  miRNA Sequence
ggcaaaauccgcaauuacuuuu

SEQ ID NO: 3219 - RNA, 22 nt, Artificial Sequence
  miRNA Sequence
aaaaguaauugcggucuuuggu

SEQ ID NO: 3220 - RNA, 22 nt, Artificial Sequence
  miRNA Sequence
accaaagaccgcaauuacuuuu

SEQ ID NO: 3221 - RNA, 22 nt, Artificial Sequence
  miRNA Sequence
aaaaguacuugcggauuuugcu

SEQ ID NO: 3222 - RNA, 22 nt, Artificial Sequence
  miRNA Sequence
agcaaaauccgcaaguacuuuu

SEQ ID NO: 3223 - RNA, 22 nt, Artificial Sequence
  miRNA Sequence
aaaaguauuugcggguuuuguc

SEQ ID NO: 3224 - RNA, 22 nt, Artificial Sequence
  miRNA Sequence
gacaaaacccgcaaauacuuuu

SEQ ID NO: 3225 - RNA, 21 nt, Artificial Sequence
  miRNA Sequence
caaagguauuugugguuuuug

SEQ ID NO: 3226 - RNA, 21 nt, Artificial Sequence
  miRNA Sequence
caaaaaccacaaauaccuuug

SEQ ID NO: 3227 - RNA, 22 nt, Artificial Sequence
  miRNA Sequence
caaaaguaauuguggauuuugu

SEQ ID NO: 3228 - RNA, 22 nt, Artificial Sequence
  miRNA Sequence
acaaaauccacaauuacuuuug

SEQ ID NO: 3229 - RNA, 22 nt, Artificial Sequence
  miRNA Sequence
ccaaaacugcaguuacuuuugc

SEQ ID NO: 3230 - RNA, 22 nt, Artificial Sequence
  miRNA Sequence
gcaaaaguaacugcaguuuugg

SEQ ID NO: 3231 - RNA, 22 nt, Artificial Sequence
  miRNA Sequence
aaaaguaauugcgguuuuugcc

SEQ ID NO: 3232 - RNA, 22 nt, Artificial Sequence
  miRNA Sequence
ggcaaaaaccgcaauuacuuuu

SEQ ID NO: 3233 - RNA, 22 nt, Artificial Sequence
  miRNA Sequence
uagcaaaaacugcaguuacuuu

SEQ ID NO: 3234 - RNA, 22 nt, Artificial Sequence
  miRNA Sequence
aaaguaacugcaguuuuugcua

SEQ ID NO: 3235 - RNA, 22 nt, Artificial Sequence
  miRNA Sequence
gcuggugcaaaaguaauggcgg

SEQ ID NO: 3236 - RNA, 22 nt, Artificial Sequence
  miRNA Sequence
ccgccauuacuuuugcaccagc

SEQ ID NO: 3237 - RNA, 23 nt, Artificial Sequence
  miRNA Sequence
auggccaaaacugcaguuauuuu

SEQ ID NO: 3238 - RNA, 23 nt, Artificial Sequence
  miRNA Sequence
aaaauaacugcaguuuuggccau

SEQ ID NO: 3239 - RNA, 25 nt, Artificial Sequence
  miRNA Sequence
aaaaaccacaauuacuuuugcacca

SEQ ID NO: 3240 - RNA, 25 nt, Artificial Sequence
  miRNA Sequence
uggugcaaaaguaauugugguuuuu

SEQ ID NO: 3241 - RNA, 21 nt, Artificial Sequence
  miRNA Sequence
caaaagugaucgugguuuuug

SEQ ID NO: 3242 - RNA, 21 nt, Artificial Sequence
  miRNA Sequence
caaaaaccacgaucacuuuug

SEQ ID NO: 3243 - RNA, 23 nt, Artificial Sequence
  miRNA Sequence
caaagacugcaauuacuuuugcg

SEQ ID NO: 3244 - RNA, 23 nt, Artificial Sequence
  miRNA Sequence
cgcaaaaguaauugcagucuuug

SEQ ID NO: 3245 - RNA, 22 nt, Artificial Sequence
  miRNA Sequence
agcuacaguuacuuuugcacca

SEQ ID NO: 3246 - RNA, 22 nt, Artificial Sequence
  miRNA Sequence
uggugcaaaaguaacuguagcu

SEQ ID NO: 3247 - RNA, 23 nt, Artificial Sequence
  miRNA Sequence
aaaaguaacugcgguuuuugccu

SEQ ID NO: 3248 - RNA, 23 nt, Artificial Sequence
  miRNA Sequence
aggcaaaaaccgcaguuacuuuu

SEQ ID NO: 3249 - RNA, 20 nt, Artificial Sequence
  miRNA Sequence
uaaaaacugcaauuacuuuc

SEQ ID NO: 3250 - RNA, 20 nt, Artificial Sequence
  miRNA Sequence
gaaaguaauugcaguuuuua

SEQ ID NO: 3251 - RNA, 23 nt, Artificial Sequence
  miRNA Sequence
ugcaaaaguaauugcaguuuuug

SEQ ID NO: 3252 - RNA, 23 nt, Artificial Sequence
  miRNA Sequence
caaaaacugcaauuacuuuugca

SEQ ID NO: 3253 - RNA, 22 nt, Artificial Sequence
  miRNA Sequence
aaaaguaaucacuguuuuugcc

SEQ ID NO: 3254 - RNA, 22 nt, Artificial Sequence
  miRNA Sequence
ggcaaaaacagugauuacuuuu

SEQ ID NO: 3255 - RNA, 23 nt, Artificial Sequence
  miRNA Sequence
caaaaaccgcaauuacuuuugca

SEQ ID NO: 3256 - RNA, 23 nt, Artificial Sequence
  miRNA Sequence
ugcaaaaguaauugcgguuuuug

SEQ ID NO: 3257 - RNA, 21 nt, Artificial Sequence
  miRNA Sequence
ugacaacuauggaugagcucu

SEQ ID NO: 3258 - RNA, 21 nt, Artificial Sequence
  miRNA Sequence
agagcucauccauaguuguca

SEQ ID NO: 3259 - RNA, 20 nt, Artificial Sequence
  miRNA Sequence
agugccugagggaguaagag

SEQ ID NO: 3260 - RNA, 20 nt, Artificial Sequence
  miRNA Sequence
cucuuacucccucaggcacu

SEQ ID NO: 3261 - RNA, 22 nt, Artificial Sequence
  miRNA Sequence
ugucuuacucccucaggcacau

SEQ ID NO: 3262 - RNA, 22 nt, Artificial Sequence
  miRNA Sequence
augugccugagggaguaagaca

SEQ ID NO: 3263 - RNA, 23 nt, Artificial Sequence
  miRNA Sequence
agugccugagggaguaagagccc

SEQ ID NO: 3264 - RNA, 23 nt, Artificial Sequence
  miRNA Sequence
gggcucuuacucccucaggcacu

SEQ ID NO: 3265 - RNA, 22 nt, Artificial Sequence
  miRNA Sequence
augugccugagggaguaagaca

SEQ ID NO: 3266 - RNA, 22 nt, Artificial Sequence
  miRNA Sequence
ugucuuacucccucaggcacau

SEQ ID NO: 3267 - RNA, 20 nt, Artificial Sequence
  miRNA Sequence
ucuuacucccucaggcacug

SEQ ID NO: 3268 - RNA, 20 nt, Artificial Sequence
  miRNA Sequence
cagugccugagggaguaaga

SEQ ID NO: 3269 - RNA, 21 nt, Artificial Sequence
  miRNA Sequence
gcgacccacucuugguuucca

SEQ ID NO: 3270 - RNA, 21 nt, Artificial Sequence
  miRNA Sequence
uggaaaccaagagugggucgc

SEQ ID NO: 3271 - RNA, 21 nt, Artificial Sequence
  miRNA Sequence
gcgacccauacuugguuucag

SEQ ID NO: 3272 - RNA, 21 nt, Artificial Sequence
  miRNA Sequence
cugaaaccaaguaugggucgc

SEQ ID NO: 3273 - RNA, 22 nt, Artificial Sequence
  miRNA Sequence
gaaaucaagcgugggugagacc

SEQ ID NO: 3274 - RNA, 22 nt, Artificial Sequence
  miRNA Sequence
ggucucacccacgcuugauuuc

SEQ ID NO: 3275 - RNA, 21 nt, Artificial Sequence
  miRNA Sequence
aacaggugacugguuagacaa

SEQ ID NO: 3276 - RNA, 21 nt, Artificial Sequence
  miRNA Sequence
uugucuaaccagucaccuguu

SEQ ID NO: 3277 - RNA, 21 nt, Artificial Sequence
  miRNA Sequence
aaaacggugagauuuuguuuu

SEQ ID NO: 3278 - RNA, 21 nt, Artificial Sequence
  miRNA Sequence
aaaacaaaaucucaccguuuu

SEQ ID NO: 3279 - RNA, 21 nt, Artificial Sequence
  miRNA Sequence
gcuaguccugacucagccagu

SEQ ID NO: 3280 - RNA, 21 nt, Artificial Sequence
  miRNA Sequence
acuggcugagucaggacuagc

SEQ ID NO: 3281 - RNA, 21 nt, Artificial Sequence
  miRNA Sequence
aggguaagcugaaccucugau

SEQ ID NO: 3282 - RNA, 21 nt, Artificial Sequence
  miRNA Sequence
aucagagguucagcuuacccu

SEQ ID NO: 3283 - RNA, 22 nt, Artificial Sequence
  miRNA Sequence
auauuaccauuagcucaucuuu

SEQ ID NO: 3284 - RNA, 22 nt, Artificial Sequence
  miRNA Sequence
aaagaugagcuaaugguaauau

SEQ ID NO: 3285 - RNA, 22 nt, Artificial Sequence
  miRNA Sequence
gaugagcucauuguaauaugag

SEQ ID NO: 3286 - RNA, 22 nt, Artificial Sequence
  miRNA Sequence
cucauauuacaaugagcucauc

SEQ ID NO: 3287 - RNA, 23 nt, Artificial Sequence
  miRNA Sequence
guuugcacgggugggccuugucu

SEQ ID NO: 3288 - RNA, 23 nt, Artificial Sequence
  miRNA Sequence
agacaaggcccacccgugcaaac

SEQ ID NO: 3289 - RNA, 19 nt, Artificial Sequence
  miRNA Sequence
guccuaggaggcuccucug

SEQ ID NO: 3290 - RNA, 19 nt, Artificial Sequence
  miRNA Sequence
cagaggagccuccuaggac

SEQ ID NO: 3291 - RNA, 21 nt, Artificial Sequence
  miRNA Sequence
caauucucaaaggagccuccc

SEQ ID NO: 3292 - RNA, 21 nt, Artificial Sequence
  miRNA Sequence
gggaggcuccuuugagaauug

SEQ ID NO: 3293 - RNA, 21 nt, Artificial Sequence
  miRNA Sequence
guuggggugcaggggucugcu

SEQ ID NO: 3294 - RNA, 21 nt, Artificial Sequence
  miRNA Sequence
agcagaccccugcaccccaac

SEQ ID NO: 3295 - RNA, 22 nt, Artificial Sequence
  miRNA Sequence
uuagcuuaaggaguaccagauc

SEQ ID NO: 3296 - RNA, 22 nt, Artificial Sequence
  miRNA Sequence
gaucugguacuccuuaagcuaa

SEQ ID NO: 3297 - RNA, 21 nt, Artificial Sequence
  miRNA Sequence
uaugguacuccuuaagcuaac

SEQ ID NO: 3298 - RNA, 21 nt, Artificial Sequence
  miRNA Sequence
guuagcuuaaggaguaccaua

SEQ ID NO: 3299 - RNA, 19 nt, Artificial Sequence
  miRNA Sequence
ugagcugcuguaccaaaau

SEQ ID NO: 3300 - RNA, 19 nt, Artificial Sequence
  miRNA Sequence
auuuugguacagcagcuca

SEQ ID NO: 3301 - RNA, 22 nt, Artificial Sequence
  miRNA Sequence
cacauaugaagugagccagcac

SEQ ID NO: 3302 - RNA, 22 nt, Artificial Sequence
  miRNA Sequence
gugcuggcucacuucauaugug

SEQ ID NO: 3303 - RNA, 22 nt, Artificial Sequence
  miRNA Sequence
ugcuggcucauuucauaugugu

SEQ ID NO: 3304 - RNA, 22 nt, Artificial Sequence
  miRNA Sequence
acacauaugaaaugagccagca

SEQ ID NO: 3305 - RNA, 22 nt, Artificial Sequence
  miRNA Sequence
uuccaugccuccuagaaguucc

SEQ ID NO: 3306 - RNA, 22 nt, Artificial Sequence
  miRNA Sequence
ggaacuucuaggaggcauggaa

SEQ ID NO: 3307 - RNA, 22 nt, Artificial Sequence
  miRNA Sequence
agccuuccaggagaaauggaga

SEQ ID NO: 3308 - RNA, 22 nt, Artificial Sequence
  miRNA Sequence
ucuccauuucuccuggaaggcu

SEQ ID NO: 3309 - RNA, 22 nt, Artificial Sequence
  miRNA Sequence
uaaaacuuuaagugugccuagg

SEQ ID NO: 3310 - RNA, 22 nt, Artificial Sequence
  miRNA Sequence
ccuaggcacacuuaaaguuuua

SEQ ID NO: 3311 - RNA, 22 nt, Artificial Sequence
  miRNA Sequence
uaggcacacuuaaaguuauagc

SEQ ID NO: 3312 - RNA, 22 nt, Artificial Sequence
  miRNA Sequence
gcuauaacuuuaagugugccua

SEQ ID NO: 3313 - RNA, 22 nt, Artificial Sequence
  miRNA Sequence
gaauauggguauauuaguuugg

SEQ ID NO: 3314 - RNA, 22 nt, Artificial Sequence
  miRNA Sequence
ccaaacuaauauacccauauuc

SEQ ID NO: 3315 - RNA, 22 nt, Artificial Sequence
  miRNA Sequence
aaacuaauauacccauauucug

SEQ ID NO: 3316 - RNA, 22 nt, Artificial Sequence
  miRNA Sequence
cagaauauggguauauuaguuu

SEQ ID NO: 3317 - RNA, 22 nt, Artificial Sequence
  miRNA Sequence
uaguucuucccuuugcccaauu

SEQ ID NO: 3318 - RNA, 22 nt, Artificial Sequence
  miRNA Sequence
aauugggcaaagggaagaacua

SEQ ID NO: 3319 - RNA, 22 nt, Artificial Sequence
  miRNA Sequence
cagggaaaugggaagaacuaga

SEQ ID NO: 3320 - RNA, 22 nt, Artificial Sequence
  miRNA Sequence
ucuaguucuucccauuucccug

SEQ ID NO: 3321 - RNA, 22 nt, Artificial Sequence
  miRNA Sequence
cugaauagcugggacuacaggu

SEQ ID NO: 3322 - RNA, 22 nt, Artificial Sequence
  miRNA Sequence
accuguagucccagcuauucag

SEQ ID NO: 3323 - RNA, 22 nt, Artificial Sequence
  miRNA Sequence
ugaaguaccagcuacucgagag

SEQ ID NO: 3324 - RNA, 22 nt, Artificial Sequence
  miRNA Sequence
cucucgaguagcugguacuuca

SEQ ID NO: 3325 - RNA, 22 nt, Artificial Sequence
  miRNA Sequence
cagagugacaagcugguuaaag

SEQ ID NO: 3326 - RNA, 22 nt, Artificial Sequence
  miRNA Sequence
cuuuaaccagcuugucacucug

SEQ ID NO: 3327 - RNA, 22 nt, Artificial Sequence
  miRNA Sequence
uauccagcuuguuacuauaugc

SEQ ID NO: 3328 - RNA, 22 nt, Artificial Sequence
  miRNA Sequence
gcauauaguaacaagcuggaua

SEQ ID NO: 3329 - RNA, 21 nt, Artificial Sequence
  miRNA Sequence
gccccgggcagugugaucauc

SEQ ID NO: 3330 - RNA, 21 nt, Artificial Sequence
  miRNA Sequence
gaugaucacacugcccggggc

SEQ ID NO: 3331 - RNA, 18 nt, Artificial Sequence
  miRNA Sequence
auggucaccuccgggacu

SEQ ID NO: 3332 - RNA, 18 nt, Artificial Sequence
  miRNA Sequence
agucccggaggugaccau

SEQ ID NO: 3333 - RNA, 19 nt, Artificial Sequence
  miRNA Sequence
aagucccacuaaugccagc

SEQ ID NO: 3334 - RNA, 19 nt, Artificial Sequence
  miRNA Sequence
gcuggcauuagugggacuu

SEQ ID NO: 3335 - RNA, 21 nt, Artificial Sequence
  miRNA Sequence
acuggcauuagugggacuuuu

SEQ ID NO: 3336 - RNA, 21 nt, Artificial Sequence
  miRNA Sequence
aaaagucccacuaaugccagu

SEQ ID NO: 3337 - RNA, 23 nt, Artificial Sequence
  miRNA Sequence
ugcacauggcaaccuagcuccca

SEQ ID NO: 3338 - RNA, 23 nt, Artificial Sequence
  miRNA Sequence
ugggagcuagguugccaugugca

SEQ ID NO: 3339 - RNA, 21 nt, Artificial Sequence
  miRNA Sequence
ggcugggugcucuugugcagu

SEQ ID NO: 3340 - RNA, 21 nt, Artificial Sequence
  miRNA Sequence
acugcacaagagcacccagcc

SEQ ID NO: 3341 - RNA, 21 nt, Artificial Sequence
  miRNA Sequence
uaaaguaaauaugcaccaaaa

SEQ ID NO: 3342 - RNA, 21 nt, Artificial Sequence
  miRNA Sequence
uuuuggugcauauuuacuuua

SEQ ID NO: 3343 - RNA, 21 nt, Artificial Sequence
  miRNA Sequence
aauaaaguucauguauggcaa

SEQ ID NO: 3344 - RNA, 21 nt, Artificial Sequence
  miRNA Sequence
uugccauacaugaacuuuauu

SEQ ID NO: 3345 - RNA, 21 nt, Artificial Sequence
  miRNA Sequence
uugccauacauagacuuuauu

SEQ ID NO: 3346 - RNA, 21 nt, Artificial Sequence
  miRNA Sequence
aauaaagucuauguauggcaa

SEQ ID NO: 3347 - RNA, 21 nt, Artificial Sequence
  miRNA Sequence
auacccauagcuuagcuccca

SEQ ID NO: 3348 - RNA, 21 nt, Artificial Sequence
  miRNA Sequence
ugggagcuaagcuauggguau

SEQ ID NO: 3349 - RNA, 21 nt, Artificial Sequence
  miRNA Sequence
ugggagcuaagcuauggguau

SEQ ID NO: 3350 - RNA, 21 nt, Artificial Sequence
  miRNA Sequence
auacccauagcuuagcuccca

SEQ ID NO: 3351 - RNA, 22 nt, Artificial Sequence
  miRNA Sequence
caaaguuuaagauccuugaagu

SEQ ID NO: 3352 - RNA, 22 nt, Artificial Sequence
  miRNA Sequence
acuucaaggaucuuaaacuuug

SEQ ID NO: 3353 - RNA, 22 nt, Artificial Sequence
  miRNA Sequence
aucaaggaucuuaaacuuugcc

SEQ ID NO: 3354 - RNA, 22 nt, Artificial Sequence
  miRNA Sequence
ggcaaaguuuaagauccuugau

SEQ ID NO: 3355 - RNA, 20 nt, Artificial Sequence
  miRNA Sequence
aaaguagcuguaccauuugc

SEQ ID NO: 3356 - RNA, 20 nt, Artificial Sequence
  miRNA Sequence
gcaaaugguacagcuacuuu

SEQ ID NO: 3357 - RNA, 19 nt, Artificial Sequence
  miRNA Sequence
agguugacauacguuuccc

SEQ ID NO: 3358 - RNA, 19 nt, Artificial Sequence
  miRNA Sequence
gggaaacguaugucaaccu

SEQ ID NO: 3359 - RNA, 19 nt, Artificial Sequence
  miRNA Sequence
aggcacggugucagcaggc

SEQ ID NO: 3360 - RNA, 19 nt, Artificial Sequence
  miRNA Sequence
gccugcugacaccgugccu

SEQ ID NO: 3361 - RNA, 19 nt, Artificial Sequence
  miRNA Sequence
gggcgccugugaucccaac

SEQ ID NO: 3362 - RNA, 19 nt, Artificial Sequence
  miRNA Sequence
guugggaucacaggcgccc

SEQ ID NO: 3363 - RNA, 23 nt, Artificial Sequence
  miRNA Sequence
aguauguucuuccaggacagaac

SEQ ID NO: 3364 - RNA, 23 nt, Artificial Sequence
  miRNA Sequence
guucuguccuggaagaacauacu

SEQ ID NO: 3365 - RNA, 20 nt, Artificial Sequence
  miRNA Sequence
auguauaaauguauacacac

SEQ ID NO: 3366 - RNA, 20 nt, Artificial Sequence
  miRNA Sequence
guguguauacauuuauacau

SEQ ID NO: 3367 - RNA, 22 nt, Artificial Sequence
  miRNA Sequence
gagaaaugcuggacuaaucugc

SEQ ID NO: 3368 - RNA, 22 nt, Artificial Sequence
  miRNA Sequence
gcagauuaguccagcauuucuc

SEQ ID NO: 3369 - RNA, 22 nt, Artificial Sequence
  miRNA Sequence
agaaaggguggcaauaccucuu

SEQ ID NO: 3370 - RNA, 22 nt, Artificial Sequence
  miRNA Sequence
aagagguauugccacccuuucu

SEQ ID NO: 3371 - RNA, 22 nt, Artificial Sequence
  miRNA Sequence
agguauugccacccuuucuagu

SEQ ID NO: 3372 - RNA, 22 nt, Artificial Sequence
  miRNA Sequence
acuagaaaggguggcaauaccu

SEQ ID NO: 3373 - RNA, 22 nt, Artificial Sequence
  miRNA Sequence
guagcaccuugcaggauaaggu

SEQ ID NO: 3374 - RNA, 22 nt, Artificial Sequence
  miRNA Sequence
accuuauccugcaaggugcuac

SEQ ID NO: 3375 - RNA, 24 nt, Artificial Sequence
  miRNA Sequence
uacagaugcagauucucugacuuc

SEQ ID NO: 3376 - RNA, 24 nt, Artificial Sequence
  miRNA Sequence
gaagucagagaaucugcaucugua

SEQ ID NO: 3377 - RNA, 20 nt, Artificial Sequence
  miRNA Sequence
aacucuagccugagcaacag

SEQ ID NO: 3378 - RNA, 20 nt, Artificial Sequence
  miRNA Sequence
cuguugcucaggcuagaguu

SEQ ID NO: 3379 - RNA, 22 nt, Artificial Sequence
  miRNA Sequence
acagcccagcaguuaucacggg

SEQ ID NO: 3380 - RNA, 22 nt, Artificial Sequence
  miRNA Sequence
cccgugauaacugcugggcugu

SEQ ID NO: 3381 - RNA, 21 nt, Artificial Sequence
  miRNA Sequence
uaucguaucguauuguauugu

SEQ ID NO: 3382 - RNA, 21 nt, Artificial Sequence
  miRNA Sequence
acaauacaauacgauacgaua

SEQ ID NO: 3383 - RNA, 22 nt, Artificial Sequence
  miRNA Sequence
uuagaacguuuuagggucaaau

SEQ ID NO: 3384 - RNA, 22 nt, Artificial Sequence
  miRNA Sequence
auuugacccuaaaacguucuaa

SEQ ID NO: 3385 - RNA, 22 nt, Artificial Sequence
  miRNA Sequence
uaacaaacaccuguaaaacagc

SEQ ID NO: 3386 - RNA, 22 nt, Artificial Sequence
  miRNA Sequence
gcuguuuuacagguguuuguua

SEQ ID NO: 3387 - RNA, 22 nt, Artificial Sequence
  miRNA Sequence
agcauacaccuguaguccuaga

SEQ ID NO: 3388 - RNA, 22 nt, Artificial Sequence
  miRNA Sequence
ucuaggacuacagguguaugcu

SEQ ID NO: 3389 - RNA, 21 nt, Artificial Sequence
  miRNA Sequence
aguuaaugaauccuggaaagu

SEQ ID NO: 3390 - RNA, 21 nt, Artificial Sequence
  miRNA Sequence
acuuuccaggauucauuaacu

SEQ ID NO: 3391 - RNA, 21 nt, Artificial Sequence
  miRNA Sequence
ucagcuacuaccucuauuagg

SEQ ID NO: 3392 - RNA, 21 nt, Artificial Sequence
  miRNA Sequence
ccuaauagagguaguagcuga

SEQ ID NO: 3393 - RNA, 22 nt, Artificial Sequence
  miRNA Sequence
uugcucugagcuccgagaaagc

SEQ ID NO: 3394 - RNA, 22 nt, Artificial Sequence
  miRNA Sequence
gcuuucucggagcucagagcaa

SEQ ID NO: 3395 - RNA, 22 nt, Artificial Sequence
  miRNA Sequence
caaauaauaccacagugggugu

SEQ ID NO: 3396 - RNA, 22 nt, Artificial Sequence
  miRNA Sequence
acacccacugugguauuauuug

SEQ ID NO: 3397 - RNA, 20 nt, Artificial Sequence
  miRNA Sequence
aauaauaucacaguaggugu

SEQ ID NO: 3398 - RNA, 20 nt, Artificial Sequence
  miRNA Sequence
acaccuacugugauauuauu

SEQ ID NO: 3399 - RNA, 22 nt, Artificial Sequence
  miRNA Sequence
aauaauaucacaguagguguac

SEQ ID NO: 3400 - RNA, 22 nt, Artificial Sequence
  miRNA Sequence
guacaccuacugugauauuauu

SEQ ID NO: 3401 - RNA, 22 nt, Artificial Sequence
  miRNA Sequence
gcaguggcucugaaaugaacuc

SEQ ID NO: 3402 - RNA, 22 nt, Artificial Sequence
  miRNA Sequence
gaguucauuucagagccacugc

SEQ ID NO: 3403 - RNA, 21 nt, Artificial Sequence
  miRNA Sequence
cagaucaugggacugucucag

SEQ ID NO: 3404 - RNA, 21 nt, Artificial Sequence
  miRNA Sequence
cugagacagucccaugaucug

SEQ ID NO: 3405 - RNA, 22 nt, Artificial Sequence
  miRNA Sequence
acuccaagaagaaucuagacag

SEQ ID NO: 3406 - RNA, 22 nt, Artificial Sequence
  miRNA Sequence
cugucuagauucuucuuggagu

SEQ ID NO: 3407 - RNA, 22 nt, Artificial Sequence
  miRNA Sequence
cucauuuaaguagucugaugcc

SEQ ID NO: 3408 - RNA, 22 nt, Artificial Sequence
  miRNA Sequence
ggcaucagacuacuuaaaugag

SEQ ID NO: 3409 - RNA, 22 nt, Artificial Sequence
  miRNA Sequence
ucaaguaguuucaugauaaagg

SEQ ID NO: 3410 - RNA, 22 nt, Artificial Sequence
  miRNA Sequence
ccuuuaucaugaaacuacuuga

SEQ ID NO: 3411 - RNA, 22 nt, Artificial Sequence
  miRNA Sequence
ugggggagugcagugauugugg

SEQ ID NO: 3412 - RNA, 22 nt, Artificial Sequence
  miRNA Sequence
ccacaaucacugcacuccccca

SEQ ID NO: 3413 - RNA, 22 nt, Artificial Sequence
  miRNA Sequence
uccugucuuuccuuguuggagc

SEQ ID NO: 3414 - RNA, 22 nt, Artificial Sequence
  miRNA Sequence
gcuccaacaaggaaagacagga

SEQ ID NO: 3415 - RNA, 22 nt, Artificial Sequence
  miRNA Sequence
cgaaaacagcaauuaccuuugc

SEQ ID NO: 3416 - RNA, 22 nt, Artificial Sequence
  miRNA Sequence
gcaaagguaauugcuguuuucg

SEQ ID NO: 3417 - RNA, 22 nt, Artificial Sequence
  miRNA Sequence
aaagguaauugcaguuuuuccc

SEQ ID NO: 3418 - RNA, 22 nt, Artificial Sequence
  miRNA Sequence
gggaaaaacugcaauuaccuuu

SEQ ID NO: 3419 - RNA, 22 nt, Artificial Sequence
  miRNA Sequence
uaaugcauuaaauuauugaagg

SEQ ID NO: 3420 - RNA, 22 nt, Artificial Sequence
  miRNA Sequence
ccuucaauaauuuaaugcauua

SEQ ID NO: 3421 - RNA, 19 nt, Artificial Sequence
  miRNA Sequence
uuauugucacguucugauu

SEQ ID NO: 3422 - RNA, 19 nt, Artificial Sequence
  miRNA Sequence
aaucagaacgugacaauaa

SEQ ID NO: 3423 - RNA, 22 nt, Artificial Sequence
  miRNA Sequence
ugagucagcaacauaucccaug

SEQ ID NO: 3424 - RNA, 22 nt, Artificial Sequence
  miRNA Sequence
caugggauauguugcugacuca

SEQ ID NO: 3425 - RNA, 18 nt, Artificial Sequence
  miRNA Sequence
aggagaagucgggaaggu

SEQ ID NO: 3426 - RNA, 18 nt, Artificial Sequence
  miRNA Sequence
accuucccgacuucuccu

SEQ ID NO: 3427 - RNA, 22 nt, Artificial Sequence
  miRNA Sequence
uuaggccaucaucccauuaugc

SEQ ID NO: 3428 - RNA, 22 nt, Artificial Sequence
  miRNA Sequence
gcauaaugggaugauggccuaa

SEQ ID NO: 3429 - RNA, 23 nt, Artificial Sequence
  miRNA Sequence
uguuucggggcucauggccugug

SEQ ID NO: 3430 - RNA, 23 nt, Artificial Sequence
  miRNA Sequence
cacaggccaugagccccgaaaca

SEQ ID NO: 3431 - RNA, 22 nt, Artificial Sequence
  miRNA Sequence
uucuggauaacaugcugaagcu

SEQ ID NO: 3432 - RNA, 22 nt, Artificial Sequence
  miRNA Sequence
agcuucagcauguuauccagaa

SEQ ID NO: 3433 - RNA, 22 nt, Artificial Sequence
  miRNA Sequence
acguuugaaugcuguacaaggc

SEQ ID NO: 3434 - RNA, 22 nt, Artificial Sequence
  miRNA Sequence
gccuuguacagcauucaaacgu

SEQ ID NO: 3435 - RNA, 20 nt, Artificial Sequence
  miRNA Sequence
augagcgacugugccugacc

SEQ ID NO: 3436 - RNA, 20 nt, Artificial Sequence
  miRNA Sequence
ggucaggcacagucgcucau

SEQ ID NO: 3437 - RNA, 21 nt, Artificial Sequence
  miRNA Sequence
ugaguuggccaucugagugag

SEQ ID NO: 3438 - RNA, 21 nt, Artificial Sequence
  miRNA Sequence
cucacucagauggccaacuca

SEQ ID NO: 3439 - RNA, 20 nt, Artificial Sequence
  miRNA Sequence
guccgcucggcgguggccca

SEQ ID NO: 3440 - RNA, 20 nt, Artificial Sequence
  miRNA Sequence
ugggccaccgccgagcggac

SEQ ID NO: 3441 - RNA, 24 nt, Artificial Sequence
  miRNA Sequence
cugaagugauguguaacugaucag

SEQ ID NO: 3442 - RNA, 24 nt, Artificial Sequence
  miRNA Sequence
cugaucaguuacacaucacuucag

SEQ ID NO: 3443 - RNA, 22 nt, Artificial Sequence
  miRNA Sequence
cacgcucaugcacacacccaca

SEQ ID NO: 3444 - RNA, 22 nt, Artificial Sequence
  miRNA Sequence
ugugggugugugcaugagcgug

SEQ ID NO: 3445 - RNA, 23 nt, Artificial Sequence
  miRNA Sequence
ugagugugugugugugagugugu

SEQ ID NO: 3446 - RNA, 23 nt, Artificial Sequence
  miRNA Sequence
acacacucacacacacacacuca

SEQ ID NO: 3447 - RNA, 19 nt, Artificial Sequence
  miRNA Sequence
gagccaguuggacaggagc

SEQ ID NO: 3448 - RNA, 19 nt, Artificial Sequence
  miRNA Sequence
gcuccuguccaacuggcuc

SEQ ID NO: 3449 - RNA, 22 nt, Artificial Sequence
  miRNA Sequence
aagauguggaaaaauuggaauc

SEQ ID NO: 3450 - RNA, 22 nt, Artificial Sequence
  miRNA Sequence
gauuccaauuuuuccacaucuu

SEQ ID NO: 3451 - RNA, 22 nt, Artificial Sequence
  miRNA Sequence
auucuaauuucuccacgucuuu

SEQ ID NO: 3452 - RNA, 22 nt, Artificial Sequence
  miRNA Sequence
aaagacguggagaaauuagaau

SEQ ID NO: 3453 - RNA, 21 nt, Artificial Sequence
  miRNA Sequence
uagauaaaauauugguaccug

SEQ ID NO: 3454 - RNA, 21 nt, Artificial Sequence
  miRNA Sequence
cagguaccaauauuuuaucua

SEQ ID NO: 3455 - RNA, 21 nt, Artificial Sequence
  miRNA Sequence
cuucuugugcucuaggauugu

SEQ ID NO: 3456 - RNA, 21 nt, Artificial Sequence
  miRNA Sequence
acaauccuagagcacaagaag

SEQ ID NO: 3457 - RNA, 23 nt, Artificial Sequence
  miRNA Sequence
uucauuugguauaaaccgcgauu

SEQ ID NO: 3458 - RNA, 23 nt, Artificial Sequence
  miRNA Sequence
aaucgcgguuuauaccaaaugaa

SEQ ID NO: 3459 - RNA, 22 nt, Artificial Sequence
  miRNA Sequence
uugagaaugaugaaucauuagg

SEQ ID NO: 3460 - RNA, 22 nt, Artificial Sequence
  miRNA Sequence
ccuaaugauucaucauucucaa

SEQ ID NO: 3461 - RNA, 21 nt, Artificial Sequence
  miRNA Sequence
ucuuguguucucuagaucagu

SEQ ID NO: 3462 - RNA, 21 nt, Artificial Sequence
  miRNA Sequence
acugaucuagagaacacaaga

SEQ ID NO: 3463 - RNA, 22 nt, Artificial Sequence
  miRNA Sequence
uaacugguugaacaacugaacc

SEQ ID NO: 3464 - RNA, 22 nt, Artificial Sequence
  miRNA Sequence
gguucaguuguucaaccaguua

SEQ ID NO: 3465 - RNA, 23 nt, Artificial Sequence
  miRNA Sequence
uuacaguuguucaaccaguuacu

SEQ ID NO: 3466 - RNA, 23 nt, Artificial Sequence
  miRNA Sequence
aguaacugguugaacaacuguaa

SEQ ID NO: 3467 - RNA, 21 nt, Artificial Sequence
  miRNA Sequence
caaagaggaaggucccauuac

SEQ ID NO: 3468 - RNA, 21 nt, Artificial Sequence
  miRNA Sequence
guaaugggaccuuccucuuug

SEQ ID NO: 3469 - RNA, 22 nt, Artificial Sequence
  miRNA Sequence
ucaguuccaggccaaccaggcu

SEQ ID NO: 3470 - RNA, 22 nt, Artificial Sequence
  miRNA Sequence
agccugguuggccuggaacuga

SEQ ID NO: 3471 - RNA, 22 nt, Artificial Sequence
  miRNA Sequence
uuaugguuugccugggacugag

SEQ ID NO: 3472 - RNA, 22 nt, Artificial Sequence
  miRNA Sequence
cucagucccaggcaaaccauaa

SEQ ID NO: 3473 - RNA, 19 nt, Artificial Sequence
  miRNA Sequence
ugggcguaucuguaugcua

SEQ ID NO: 3474 - RNA, 19 nt, Artificial Sequence
  miRNA Sequence
uagcauacagauacgccca

SEQ ID NO: 3475 - RNA, 22 nt, Artificial Sequence
  miRNA Sequence
uaugcauuguauuuuuaggucc

SEQ ID NO: 3476 - RNA, 22 nt, Artificial Sequence
  miRNA Sequence
ggaccuaaaaauacaaugcaua

SEQ ID NO: 3477 - RNA, 21 nt, Artificial Sequence
  miRNA Sequence
uuuccauaggugaugagucac

SEQ ID NO: 3478 - RNA, 21 nt, Artificial Sequence
  miRNA Sequence
gugacucaucaccuauggaaa

SEQ ID NO: 3479 - RNA, 21 nt, Artificial Sequence
  miRNA Sequence
uuggccacaauggguuagaac

SEQ ID NO: 3480 - RNA, 21 nt, Artificial Sequence
  miRNA Sequence
guucuaacccauuguggccaa

SEQ ID NO: 3481 - RNA, 24 nt, Artificial Sequence
  miRNA Sequence
ucagaacaaaugccgguucccaga

SEQ ID NO: 3482 - RNA, 24 nt, Artificial Sequence
  miRNA Sequence
ucugggaaccggcauuuguucuga

SEQ ID NO: 3483 - RNA, 22 nt, Artificial Sequence
  miRNA Sequence
ugagaaccacgucugcucugag

SEQ ID NO: 3484 - RNA, 22 nt, Artificial Sequence
  miRNA Sequence
cucagagcagacgugguucuca

SEQ ID NO: 3485 - RNA, 21 nt, Artificial Sequence
  miRNA Sequence
uaauuuuauguauaagcuagu

SEQ ID NO: 3486 - RNA, 21 nt, Artificial Sequence
  miRNA Sequence
acuagcuuauacauaaaauua

SEQ ID NO: 3487 - RNA, 22 nt, Artificial Sequence
  miRNA Sequence
gagcuuauucauaaaagugcag

SEQ ID NO: 3488 - RNA, 22 nt, Artificial Sequence
  miRNA Sequence
cugcacuuuuaugaauaagcuc

SEQ ID NO: 3489 - RNA, 20 nt, Artificial Sequence
  miRNA Sequence
agaccauggguucucauugu

SEQ ID NO: 3490 - RNA, 20 nt, Artificial Sequence
  miRNA Sequence
acaaugagaacccauggucu

SEQ ID NO: 3491 - RNA, 22 nt, Artificial Sequence
  miRNA Sequence
uugugucaauaugcgaugaugu

SEQ ID NO: 3492 - RNA, 22 nt, Artificial Sequence
  miRNA Sequence
acaucaucgcauauugacacaa

SEQ ID NO: 3493 - RNA, 19 nt, Artificial Sequence
  miRNA Sequence
ugucucugcugggguuucu

SEQ ID NO: 3494 - RNA, 19 nt, Artificial Sequence
  miRNA Sequence
agaaaccccagcagagaca

SEQ ID NO: 3495 - RNA, 25 nt, Artificial Sequence
  miRNA Sequence
aggcaccagccaggcauugcucagc

SEQ ID NO: 3496 - RNA, 25 nt, Artificial Sequence
  miRNA Sequence
gcugagcaaugccuggcuggugccu

SEQ ID NO: 3497 - RNA, 21 nt, Artificial Sequence
  miRNA Sequence
gaagugugccguggugugucu

SEQ ID NO: 3498 - RNA, 21 nt, Artificial Sequence
  miRNA Sequence
agacacaccacggcacacuuc

SEQ ID NO: 3499 - RNA, 21 nt, Artificial Sequence
  miRNA Sequence
aagccugcccggcuccucggg

SEQ ID NO: 3500 - RNA, 21 nt, Artificial Sequence
  miRNA Sequence
cccgaggagccgggcaggcuu

SEQ ID NO: 3501 - RNA, 22 nt, Artificial Sequence
  miRNA Sequence
ugugucacucgaugaccacugu

SEQ ID NO: 3502 - RNA, 22 nt, Artificial Sequence
  miRNA Sequence
acaguggucaucgagugacaca

SEQ ID NO: 3503 - RNA, 22 nt, Artificial Sequence
  miRNA Sequence
uacgucaucguugucaucguca

SEQ ID NO: 3504 - RNA, 22 nt, Artificial Sequence
  miRNA Sequence
ugacgaugacaacgaugacgua

SEQ ID NO: 3505 - RNA, 20 nt, Artificial Sequence
  miRNA Sequence
guugugucaguuuaucaaac

SEQ ID NO: 3506 - RNA, 20 nt, Artificial Sequence
  miRNA Sequence
guuugauaaacugacacaac

SEQ ID NO: 3507 - RNA, 23 nt, Artificial Sequence
  miRNA Sequence
acuuacagacaagagccuugcuc

SEQ ID NO: 3508 - RNA, 23 nt, Artificial Sequence
  miRNA Sequence
gagcaaggcucuugucuguaagu

SEQ ID NO: 3509 - RNA, 22 nt, Artificial Sequence
  miRNA Sequence
uggucuaggauuguuggaggag

SEQ ID NO: 3510 - RNA, 22 nt, Artificial Sequence
  miRNA Sequence
cuccuccaacaauccuagacca

SEQ ID NO: 3511 - RNA, 23 nt, Artificial Sequence
  miRNA Sequence
gacacgggcgacagcugcggccc

SEQ ID NO: 3512 - RNA, 23 nt, Artificial Sequence
  miRNA Sequence
gggccgcagcugucgcccguguc

SEQ ID NO: 3513 - RNA, 22 nt, Artificial Sequence
  miRNA Sequence
cacacacugcaauuacuuuugc

SEQ ID NO: 3514 - RNA, 22 nt, Artificial Sequence
  miRNA Sequence
gcaaaaguaauugcagugugug

SEQ ID NO: 3515 - RNA, 19 nt, Artificial Sequence
  miRNA Sequence
aggcugcggaauucaggac

SEQ ID NO: 3516 - RNA, 19 nt, Artificial Sequence
  miRNA Sequence
guccugaauuccgcagccu

SEQ ID NO: 3517 - RNA, 23 nt, Artificial Sequence
  miRNA Sequence
uaaaucccauggugccuucuccu

SEQ ID NO: 3518 - RNA, 23 nt, Artificial Sequence
  miRNA Sequence
aggagaaggcaccaugggauuua

SEQ ID NO: 3519 - RNA, 21 nt, Artificial Sequence
  miRNA Sequence
aaacuacugaaaaucaaagau

SEQ ID NO: 3520 - RNA, 21 nt, Artificial Sequence
  miRNA Sequence
aucuuugauuuucaguaguuu

SEQ ID NO: 3521 - RNA, 21 nt, Artificial Sequence
  miRNA Sequence
guucaaauccagaucuauaac

SEQ ID NO: 3522 - RNA, 21 nt, Artificial Sequence
  miRNA Sequence
guuauagaucuggauuugaac

SEQ ID NO: 3523 - RNA, 25 nt, Artificial Sequence
  miRNA Sequence
aggggugguguugggacagcuccgu

SEQ ID NO: 3524 - RNA, 25 nt, Artificial Sequence
  miRNA Sequence
acggagcugucccaacaccaccccu

SEQ ID NO: 3525 - RNA, 20 nt, Artificial Sequence
  miRNA Sequence
aggguguuucucucaucucu

SEQ ID NO: 3526 - RNA, 20 nt, Artificial Sequence
  miRNA Sequence
agagaugagagaaacacccu

SEQ ID NO: 3527 - RNA, 21 nt, Artificial Sequence
  miRNA Sequence
ugagcuaaaugugugcuggga

SEQ ID NO: 3528 - RNA, 21 nt, Artificial Sequence
  miRNA Sequence
ucccagcacacauuuagcuca

SEQ ID NO: 3529 - RNA, 23 nt, Artificial Sequence
  miRNA Sequence
gcgaggaccccucggggucugac

SEQ ID NO: 3530 - RNA, 23 nt, Artificial Sequence
  miRNA Sequence
gucagaccccgagggguccucgc

SEQ ID NO: 3531 - RNA, 25 nt, Artificial Sequence
  miRNA Sequence
gcugggcagggcuucugagcuccuu

SEQ ID NO: 3532 - RNA, 25 nt, Artificial Sequence
  miRNA Sequence
aaggagcucagaagcccugcccagc

SEQ ID NO: 3533 - RNA, 20 nt, Artificial Sequence
  miRNA Sequence
aggaauguuccuucuuugcc

SEQ ID NO: 3534 - RNA, 20 nt, Artificial Sequence
  miRNA Sequence
ggcaaagaaggaacauuccu

SEQ ID NO: 3535 - RNA, 23 nt, Artificial Sequence
  miRNA Sequence
gaacgccuguucuugccaggugg

SEQ ID NO: 3536 - RNA, 23 nt, Artificial Sequence
  miRNA Sequence
ccaccuggcaagaacaggcguuc

SEQ ID NO: 3537 - RNA, 22 nt, Artificial Sequence
  miRNA Sequence
uccgagccugggucucccucuu

SEQ ID NO: 3538 - RNA, 22 nt, Artificial Sequence
  miRNA Sequence
aagagggagacccaggcucgga

SEQ ID NO: 3539 - RNA, 22 nt, Artificial Sequence
  miRNA Sequence
ggggguccccggugcucggauc

SEQ ID NO: 3540 - RNA, 22 nt, Artificial Sequence
  miRNA Sequence
gauccgagcaccggggaccccc

SEQ ID NO: 3541 - RNA, 22 nt, Artificial Sequence
  miRNA Sequence
agucauuggaggguuugagcag

SEQ ID NO: 3542 - RNA, 22 nt, Artificial Sequence
  miRNA Sequence
cugcucaaacccuccaaugacu

SEQ ID NO: 3543 - RNA, 22 nt, Artificial Sequence
  miRNA Sequence
acucaaaacccuucagugacuu

SEQ ID NO: 3544 - RNA, 22 nt, Artificial Sequence
  miRNA Sequence
aagucacugaaggguuuugagu

SEQ ID NO: 3545 - RNA, 22 nt, Artificial Sequence
  miRNA Sequence
agacuucccauuugaagguggc

SEQ ID NO: 3546 - RNA, 22 nt, Artificial Sequence
  miRNA Sequence
gccaccuucaaaugggaagucu

SEQ ID NO: 3547 - RNA, 23 nt, Artificial Sequence
  miRNA Sequence
aaacucuacuuguccuucugagu

SEQ ID NO: 3548 - RNA, 23 nt, Artificial Sequence
  miRNA Sequence
acucagaaggacaaguagaguuu

SEQ ID NO: 3549 - RNA, 24 nt, Artificial Sequence
  miRNA Sequence
gaccuggacauguuugugcccagu

SEQ ID NO: 3550 - RNA, 24 nt, Artificial Sequence
  miRNA Sequence
acugggcacaaacauguccagguc

SEQ ID NO: 3551 - RNA, 20 nt, Artificial Sequence
  miRNA Sequence
auggagauagauauagaaau

SEQ ID NO: 3552 - RNA, 20 nt, Artificial Sequence
  miRNA Sequence
auuucuauaucuaucuccau

SEQ ID NO: 3553 - RNA, 21 nt, Artificial Sequence
  miRNA Sequence
ggcuagcaacagcgcuuaccu

SEQ ID NO: 3554 - RNA, 21 nt, Artificial Sequence
  miRNA Sequence
agguaagcgcuguugcuagcc

SEQ ID NO: 3555 - RNA, 21 nt, Artificial Sequence
  miRNA Sequence
acagucugcugagguuggagc

SEQ ID NO: 3556 - RNA, 21 nt, Artificial Sequence
  miRNA Sequence
gcuccaaccucagcagacugu

SEQ ID NO: 3557 - RNA, 23 nt, Artificial Sequence
  miRNA Sequence
aucccuugcaggggcuguugggu

SEQ ID NO: 3558 - RNA, 23 nt, Artificial Sequence
  miRNA Sequence
acccaacagccccugcaagggau

SEQ ID NO: 3559 - RNA, 21 nt, Artificial Sequence
  miRNA Sequence
cacaagguauugguauuaccu

SEQ ID NO: 3560 - RNA, 21 nt, Artificial Sequence
  miRNA Sequence
agguaauaccaauaccuugug

SEQ ID NO: 3561 - RNA, 22 nt, Artificial Sequence
  miRNA Sequence
uaguaccaguaccuuguguuca

SEQ ID NO: 3562 - RNA, 22 nt, Artificial Sequence
  miRNA Sequence
ugaacacaagguacugguacua

SEQ ID NO: 3563 - RNA, 22 nt, Artificial Sequence
  miRNA Sequence
gacuauagaacuuucccccuca

SEQ ID NO: 3564 - RNA, 22 nt, Artificial Sequence
  miRNA Sequence
ugagggggaaaguucuauaguc

SEQ ID NO: 3565 - RNA, 21 nt, Artificial Sequence
  miRNA Sequence
agggggaaaguucuauagucc

SEQ ID NO: 3566 - RNA, 21 nt, Artificial Sequence
  miRNA Sequence
ggacuauagaacuuucccccu

SEQ ID NO: 3567 - RNA, 19 nt, Artificial Sequence
  miRNA Sequence
agcugucugaaaaugucuu

SEQ ID NO: 3568 - RNA, 19 nt, Artificial Sequence
  miRNA Sequence
aagacauuuucagacagcu

SEQ ID NO: 3569 - RNA, 22 nt, Artificial Sequence
  miRNA Sequence
gugagucucuaagaaaagagga

SEQ ID NO: 3570 - RNA, 22 nt, Artificial Sequence
  miRNA Sequence
uccucuuuucuuagagacucac

SEQ ID NO: 3571 - RNA, 21 nt, Artificial Sequence
  miRNA Sequence
ucuaguaagaguggcagucga

SEQ ID NO: 3572 - RNA, 21 nt, Artificial Sequence
  miRNA Sequence
ucgacugccacucuuacuaga

SEQ ID NO: 3573 - RNA, 22 nt, Artificial Sequence
  miRNA Sequence
augcugacauauuuacuagagg

SEQ ID NO: 3574 - RNA, 22 nt, Artificial Sequence
  miRNA Sequence
ccucuaguaaauaugucagcau

SEQ ID NO: 3575 - RNA, 22 nt, Artificial Sequence
  miRNA Sequence
guucucccaacguaagcccagc

SEQ ID NO: 3576 - RNA, 22 nt, Artificial Sequence
  miRNA Sequence
gcugggcuuacguugggagaac

SEQ ID NO: 3577 - RNA, 21 nt, Artificial Sequence
  miRNA Sequence
uggguuuacguugggagaacu

SEQ ID NO: 3578 - RNA, 21 nt, Artificial Sequence
  miRNA Sequence
aguucucccaacguaaaccca

SEQ ID NO: 3579 - RNA, 22 nt, Artificial Sequence
  miRNA Sequence
aguauucuguaccagggaaggu

SEQ ID NO: 3580 - RNA, 22 nt, Artificial Sequence
  miRNA Sequence
accuucccugguacagaauacu

SEQ ID NO: 3581 - RNA, 21 nt, Artificial Sequence
  miRNA Sequence
agaccuggcccagaccucagc

SEQ ID NO: 3582 - RNA, 21 nt, Artificial Sequence
  miRNA Sequence
gcugaggucugggccaggucu

SEQ ID NO: 3583 - RNA, 19 nt, Artificial Sequence
  miRNA Sequence
gugucugcuuccuguggga

SEQ ID NO: 3584 - RNA, 19 nt, Artificial Sequence
  miRNA Sequence
ucccacaggaagcagacac

SEQ ID NO: 3585 - RNA, 23 nt, Artificial Sequence
  miRNA Sequence
cuaauaguaucuaccacaauaaa

SEQ ID NO: 3586 - RNA, 23 nt, Artificial Sequence
  miRNA Sequence
uuuauugugguagauacuauuag

SEQ ID NO: 3587 - RNA, 22 nt, Artificial Sequence
  miRNA Sequence
aaccagcaccccaacuuuggac

SEQ ID NO: 3588 - RNA, 22 nt, Artificial Sequence
  miRNA Sequence
guccaaaguuggggugcugguu

SEQ ID NO: 3589 - RNA, 23 nt, Artificial Sequence
  miRNA Sequence
acuugggcacugaaacaaugucc

SEQ ID NO: 3590 - RNA, 23 nt, Artificial Sequence
  miRNA Sequence
ggacauuguuucagugcccaagu

SEQ ID NO: 3591 - RNA, 23 nt, Artificial Sequence
  miRNA Sequence
ugugcuugcucgucccgcccgca

SEQ ID NO: 3592 - RNA, 23 nt, Artificial Sequence
  miRNA Sequence
ugcgggcgggacgagcaagcaca

SEQ ID NO: 3593 - RNA, 24 nt, Artificial Sequence
  miRNA Sequence
acugggggcuuucgggcucugcgu

SEQ ID NO: 3594 - RNA, 24 nt, Artificial Sequence
  miRNA Sequence
acgcagagcccgaaagcccccagu

SEQ ID NO: 3595 - RNA, 25 nt, Artificial Sequence
  miRNA Sequence
agggaucgcgggcggguggcggccu

SEQ ID NO: 3596 - RNA, 25 nt, Artificial Sequence
  miRNA Sequence
aggccgccacccgcccgcgaucccu

SEQ ID NO: 3597 - RNA, 23 nt, Artificial Sequence
  miRNA Sequence
aucgcugcgguugcgagcgcugu

SEQ ID NO: 3598 - RNA, 23 nt, Artificial Sequence
  miRNA Sequence
acagcgcucgcaaccgcagcgau

SEQ ID NO: 3599 - RNA, 21 nt, Artificial Sequence
  miRNA Sequence
augauccaggaaccugccucu

SEQ ID NO: 3600 - RNA, 21 nt, Artificial Sequence
  miRNA Sequence
agaggcagguuccuggaucau

SEQ ID NO: 3601 - RNA, 24 nt, Artificial Sequence
  miRNA Sequence
aaagacauaggauagagucaccuc

SEQ ID NO: 3602 - RNA, 24 nt, Artificial Sequence
  miRNA Sequence
gaggugacucuauccuaugucuuu

SEQ ID NO: 3603 - RNA, 22 nt, Artificial Sequence
  miRNA Sequence
agacacauuuggagagggaacc

SEQ ID NO: 3604 - RNA, 22 nt, Artificial Sequence
  miRNA Sequence
gguucccucuccaaaugugucu

SEQ ID NO: 3605 - RNA, 22 nt, Artificial Sequence
  miRNA Sequence
gucccucuccaaaugugucuug

SEQ ID NO: 3606 - RNA, 22 nt, Artificial Sequence
  miRNA Sequence
caagacacauuuggagagggac

SEQ ID NO: 3607 - RNA, 22 nt, Artificial Sequence
  miRNA Sequence
agacacauuuggagagggaccc

SEQ ID NO: 3608 - RNA, 22 nt, Artificial Sequence
  miRNA Sequence
gggucccucuccaaaugugucu

SEQ ID NO: 3609 - RNA, 22 nt, Artificial Sequence
  miRNA Sequence
gguucccucuccaaaugugucu

SEQ ID NO: 3610 - RNA, 22 nt, Artificial Sequence
  miRNA Sequence
agacacauuuggagagggaacc

SEQ ID NO: 3611 - RNA, 22 nt, Artificial Sequence
  miRNA Sequence
acuuguaugcuagcucagguag

SEQ ID NO: 3612 - RNA, 22 nt, Artificial Sequence
  miRNA Sequence
cuaccugagcuagcauacaagu

SEQ ID NO: 3613 - RNA, 19 nt, Artificial Sequence
  miRNA Sequence
aguguggcuuucuuagagc

SEQ ID NO: 3614 - RNA, 19 nt, Artificial Sequence
  miRNA Sequence
gcucuaagaaagccacacu

SEQ ID NO: 3615 - RNA, 22 nt, Artificial Sequence
  miRNA Sequence
uucauuugccucccagccuaca

SEQ ID NO: 3616 - RNA, 22 nt, Artificial Sequence
  miRNA Sequence
uguaggcugggaggcaaaugaa

SEQ ID NO: 3617 - RNA, 24 nt, Artificial Sequence
  miRNA Sequence
ugggcuaagggagaugauugggua

SEQ ID NO: 3618 - RNA, 24 nt, Artificial Sequence
  miRNA Sequence
uacccaaucaucucccuuagccca

SEQ ID NO: 3619 - RNA, 19 nt, Artificial Sequence
  miRNA Sequence
ucuaggcugguacugcuga

SEQ ID NO: 3620 - RNA, 19 nt, Artificial Sequence
  miRNA Sequence
ucagcaguaccagccuaga

SEQ ID NO: 3621 - RNA, 19 nt, Artificial Sequence
  miRNA Sequence
aagcagcugccucugaggc

SEQ ID NO: 3622 - RNA, 19 nt, Artificial Sequence
  miRNA Sequence
gccucagaggcagcugcuu

SEQ ID NO: 3623 - RNA, 21 nt, Artificial Sequence
  miRNA Sequence
guggcugcacucacuuccuuc

SEQ ID NO: 3624 - RNA, 21 nt, Artificial Sequence
  miRNA Sequence
gaaggaagugagugcagccac

SEQ ID NO: 3625 - RNA, 19 nt, Artificial Sequence
  miRNA Sequence
aagugugcagggcacuggu

SEQ ID NO: 3626 - RNA, 19 nt, Artificial Sequence
  miRNA Sequence
accagugcccugcacacuu

SEQ ID NO: 3627 - RNA, 22 nt, Artificial Sequence
  miRNA Sequence
aaaccuguguuguucaagaguc

SEQ ID NO: 3628 - RNA, 22 nt, Artificial Sequence
  miRNA Sequence
gacucuugaacaacacagguuu

SEQ ID NO: 3629 - RNA, 21 nt, Artificial Sequence
  miRNA Sequence
aggaggcagcgcucucaggac

SEQ ID NO: 3630 - RNA, 21 nt, Artificial Sequence
  miRNA Sequence
guccugagagcgcugccuccu

SEQ ID NO: 3631 - RNA, 22 nt, Artificial Sequence
  miRNA Sequence
uuuaggauaagcuugacuuuug

SEQ ID NO: 3632 - RNA, 22 nt, Artificial Sequence
  miRNA Sequence
caaaagucaagcuuauccuaaa

SEQ ID NO: 3633 - RNA, 21 nt, Artificial Sequence
  miRNA Sequence
aauggcgccacuaggguugug

SEQ ID NO: 3634 - RNA, 21 nt, Artificial Sequence
  miRNA Sequence
cacaacccuaguggcgccauu

SEQ ID NO: 3635 - RNA, 25 nt, Artificial Sequence
  miRNA Sequence
caacccuaggagagggugccauuca

SEQ ID NO: 3636 - RNA, 25 nt, Artificial Sequence
  miRNA Sequence
ugaauggcacccucuccuaggguug

SEQ ID NO: 3637 - RNA, 21 nt, Artificial Sequence
  miRNA Sequence
guguugaaacaaucucuacug

SEQ ID NO: 3638 - RNA, 21 nt, Artificial Sequence
  miRNA Sequence
caguagagauuguuucaacac

SEQ ID NO: 3639 - RNA, 22 nt, Artificial Sequence
  miRNA Sequence
uaugucugcugaccaucaccuu

SEQ ID NO: 3640 - RNA, 22 nt, Artificial Sequence
  miRNA Sequence
aaggugauggucagcagacaua

SEQ ID NO: 3641 - RNA, 22 nt, Artificial Sequence
  miRNA Sequence
uggugggccgcagaacaugugc

SEQ ID NO: 3642 - RNA, 22 nt, Artificial Sequence
  miRNA Sequence
gcacauguucugcggcccacca

SEQ ID NO: 3643 - RNA, 22 nt, Artificial Sequence
  miRNA Sequence
auaauacaugguuaaccucuuu

SEQ ID NO: 3644 - RNA, 22 nt, Artificial Sequence
  miRNA Sequence
aaagagguuaaccauguauuau

SEQ ID NO: 3645 - RNA, 21 nt, Artificial Sequence
  miRNA Sequence
aauauuauacagucaaccucu

SEQ ID NO: 3646 - RNA, 21 nt, Artificial Sequence
  miRNA Sequence
agagguugacuguauaauauu

SEQ ID NO: 3647 - RNA, 23 nt, Artificial Sequence
  miRNA Sequence
ggcagguucucacccucucuagg

SEQ ID NO: 3648 - RNA, 23 nt, Artificial Sequence
  miRNA Sequence
ccuagagagggugagaaccugcc

SEQ ID NO: 3649 - RNA, 25 nt, Artificial Sequence
  miRNA Sequence
ggcggagggaaguagguccguuggu

SEQ ID NO: 3650 - RNA, 25 nt, Artificial Sequence
  miRNA Sequence
accaacggaccuacuucccuccgcc

SEQ ID NO: 3651 - RNA, 22 nt, Artificial Sequence
  miRNA Sequence
cuugguucagggagggucccca

SEQ ID NO: 3652 - RNA, 22 nt, Artificial Sequence
  miRNA Sequence
uggggacccucccugaaccaag

SEQ ID NO: 3653 - RNA, 22 nt, Artificial Sequence
  miRNA Sequence
aggaccuucccugaaccaagga

SEQ ID NO: 3654 - RNA, 22 nt, Artificial Sequence
  miRNA Sequence
uccuugguucagggaagguccu

SEQ ID NO: 3655 - RNA, 21 nt, Artificial Sequence
  miRNA Sequence
accuccugugugcauggauua

SEQ ID NO: 3656 - RNA, 21 nt, Artificial Sequence
  miRNA Sequence
uaauccaugcacacaggaggu

SEQ ID NO: 3657 - RNA, 22 nt, Artificial Sequence
  miRNA Sequence
uacccauugcauaucggaguug

SEQ ID NO: 3658 - RNA, 22 nt, Artificial Sequence
  miRNA Sequence
caacuccgauaugcaaugggua

SEQ ID NO: 3659 - RNA, 24 nt, Artificial Sequence
  miRNA Sequence
ugccugggucucuggccugcgcgu

SEQ ID NO: 3660 - RNA, 24 nt, Artificial Sequence
  miRNA Sequence
acgcgcaggccagagacccaggca

SEQ ID NO: 3661 - RNA, 21 nt, Artificial Sequence
  miRNA Sequence
ucccacguuguggcccagcag

SEQ ID NO: 3662 - RNA, 21 nt, Artificial Sequence
  miRNA Sequence
cugcugggccacaacguggga

SEQ ID NO: 3663 - RNA, 22 nt, Artificial Sequence
  miRNA Sequence
aggcggggcgccgcgggaccgc

SEQ ID NO: 3664 - DNA, 22 bp, Artificial Sequence
  miRNA Sequence
gcggtcccgcggcgccccgcct

SEQ ID NO: 3665 - RNA, 22 nt, Artificial Sequence
  miRNA Sequence
gguggcccggccgugccugagg

SEQ ID NO: 3666 - RNA, 22 nt, Artificial Sequence
  miRNA Sequence
ccucaggcacggccgggccacc

SEQ ID NO: 3667 - RNA, 23 nt, Artificial Sequence
  miRNA Sequence
uauucauuuauccccagccuaca

SEQ ID NO: 3668 - RNA, 23 nt, Artificial Sequence
  miRNA Sequence
uguaggcuggggauaaaugaaua

SEQ ID NO: 3669 - RNA, 24 nt, Artificial Sequence
  miRNA Sequence
acuggcuagggaaaaugauuggau

SEQ ID NO: 3670 - RNA, 24 nt, Artificial Sequence
  miRNA Sequence
auccaaucauuuucccuagccagu

SEQ ID NO: 3671 - RNA, 20 nt, Artificial Sequence
  miRNA Sequence
accaggaggcugaggccccu

SEQ ID NO: 3672 - RNA, 20 nt, Artificial Sequence
  miRNA Sequence
aggggccucagccuccuggu

SEQ ID NO: 3673 - RNA, 23 nt, Artificial Sequence
  miRNA Sequence
ugucacucggcucggcccacuac

SEQ ID NO: 3674 - RNA, 23 nt, Artificial Sequence
  miRNA Sequence
guagugggccgagccgagugaca

SEQ ID NO: 3675 - RNA, 20 nt, Artificial Sequence
  miRNA Sequence
gucccugaguguauguggug

SEQ ID NO: 3676 - RNA, 20 nt, Artificial Sequence
  miRNA Sequence
caccacauacacucagggac

SEQ ID NO: 3677 - RNA, 21 nt, Artificial Sequence
  miRNA Sequence
uccgguucucagggcuccacc

SEQ ID NO: 3678 - RNA, 21 nt, Artificial Sequence
  miRNA Sequence
gguggagcccugagaaccgga

SEQ ID NO: 3679 - RNA, 23 nt, Artificial Sequence
  miRNA Sequence
aggaagcccuggaggggcuggag

SEQ ID NO: 3680 - RNA, 23 nt, Artificial Sequence
  miRNA Sequence
cuccagccccuccagggcuuccu

SEQ ID NO: 3681 - RNA, 20 nt, Artificial Sequence
  miRNA Sequence
cuguaugcccucaccgcuca

SEQ ID NO: 3682 - RNA, 20 nt, Artificial Sequence
  miRNA Sequence
ugagcggugagggcauacag

SEQ ID NO: 3683 - RNA, 23 nt, Artificial Sequence
  miRNA Sequence
uggugcggagagggcccacagug

SEQ ID NO: 3684 - RNA, 23 nt, Artificial Sequence
  miRNA Sequence
cacugugggcccucuccgcacca

SEQ ID NO: 3685 - RNA, 21 nt, Artificial Sequence
  miRNA Sequence
cuguccuaagguuguugaguu

SEQ ID NO: 3686 - RNA, 21 nt, Artificial Sequence
  miRNA Sequence
aacucaacaaccuuaggacag

SEQ ID NO: 3687 - RNA, 21 nt, Artificial Sequence
  miRNA Sequence
ucuucaaccucaggacuugca

SEQ ID NO: 3688 - RNA, 21 nt, Artificial Sequence
  miRNA Sequence
ugcaaguccugagguugaaga

SEQ ID NO: 3689 - RNA, 22 nt, Artificial Sequence
  miRNA Sequence
caacaaaucacagucugccaua

SEQ ID NO: 3690 - RNA, 22 nt, Artificial Sequence
  miRNA Sequence
uauggcagacugugauuuguug

SEQ ID NO: 3691 - RNA, 22 nt, Artificial Sequence
  miRNA Sequence
caacaaaucccagucuaccuaa

SEQ ID NO: 3692 - RNA, 22 nt, Artificial Sequence
  miRNA Sequence
uuagguagacugggauuuguug

SEQ ID NO: 3693 - RNA, 23 nt, Artificial Sequence
  miRNA Sequence
uggaagacuagugauuuuguugu

SEQ ID NO: 3694 - RNA, 23 nt, Artificial Sequence
  miRNA Sequence
acaacaaaaucacuagucuucca

SEQ ID NO: 3695 - RNA, 22 nt, Artificial Sequence
  miRNA Sequence
caacuagacugugagcuucuag

SEQ ID NO: 3696 - RNA, 22 nt, Artificial Sequence
  miRNA Sequence
cuagaagcucacagucuaguug

SEQ ID NO: 3697 - RNA, 23 nt, Artificial Sequence
  miRNA Sequence
aaggagcuuacaaucuagcuggg

SEQ ID NO: 3698 - RNA, 23 nt, Artificial Sequence
  miRNA Sequence
cccagcuagauuguaagcuccuu

SEQ ID NO: 3699 - RNA, 22 nt, Artificial Sequence
  miRNA Sequence
gggacccagggagagacguaag

SEQ ID NO: 3700 - RNA, 22 nt, Artificial Sequence
  miRNA Sequence
cuuacgucucucccuggguccc

SEQ ID NO: 3701 - RNA, 21 nt, Artificial Sequence
  miRNA Sequence
cuuccgccccgccgggcgucg

SEQ ID NO: 3702 - RNA, 21 nt, Artificial Sequence
  miRNA Sequence
cgacgcccggcggggcggaag

SEQ ID NO: 3703 - RNA, 17 nt, Artificial Sequence
  miRNA Sequence
ucucgcuggggccucca

SEQ ID NO: 3704 - RNA, 17 nt, Artificial Sequence
  miRNA Sequence
uggaggccccagcgaga

SEQ ID NO: 3705 - RNA, 22 nt, Artificial Sequence
  miRNA Sequence
cuguugccacuaaccucaaccu

SEQ ID NO: 3706 - RNA, 22 nt, Artificial Sequence
  miRNA Sequence
agguugagguuaguggcaacag

SEQ ID NO: 3707 - RNA, 22 nt, Artificial Sequence
  miRNA Sequence
ugcggggcuagggcuaacagca

SEQ ID NO: 3708 - RNA, 22 nt, Artificial Sequence
  miRNA Sequence
ugcuguuagcccuagccccgca

SEQ ID NO: 3709 - RNA, 22 nt, Artificial Sequence
  miRNA Sequence
uuugugaccugguccacuaacc

SEQ ID NO: 3710 - RNA, 22 nt, Artificial Sequence
  miRNA Sequence
gguuaguggaccaggucacaaa

SEQ ID NO: 3711 - RNA, 22 nt, Artificial Sequence
  miRNA Sequence
gcagagugcaaacaauuuugac

SEQ ID NO: 3712 - RNA, 22 nt, Artificial Sequence
  miRNA Sequence
gucaaaauuguuugcacucugc

SEQ ID NO: 3713 - RNA, 20 nt, Artificial Sequence
  miRNA Sequence
cggcucugggucugugggga

SEQ ID NO: 3714 - RNA, 20 nt, Artificial Sequence
  miRNA Sequence
uccccacagacccagagccg

SEQ ID NO: 3715 - RNA, 22 nt, Artificial Sequence
  miRNA Sequence
gcagcagggugaaacugacaca

SEQ ID NO: 3716 - RNA, 22 nt, Artificial Sequence
  miRNA Sequence
ugugucaguuucacccugcugc

SEQ ID NO: 3717 - RNA, 22 nt, Artificial Sequence
  miRNA Sequence
ggggcuggggccggggccgagc

SEQ ID NO: 3718 - RNA, 22 nt, Artificial Sequence
  miRNA Sequence
gcucggccccggccccagcccc

SEQ ID NO: 3719 - RNA, 22 nt, Artificial Sequence
  miRNA Sequence
gcaggugcucacuuguccuccu

SEQ ID NO: 3720 - RNA, 22 nt, Artificial Sequence
  miRNA Sequence
aggaggacaagugagcaccugc

SEQ ID NO: 3721 - RNA, 21 nt, Artificial Sequence
  miRNA Sequence
uggaggagaaggaaggugaug

SEQ ID NO: 3722 - RNA, 21 nt, Artificial Sequence
  miRNA Sequence
caucaccuuccuucuccucca

SEQ ID NO: 3723 - RNA, 22 nt, Artificial Sequence
  miRNA Sequence
acuccagccccacagccucagc

SEQ ID NO: 3724 - RNA, 22 nt, Artificial Sequence
  miRNA Sequence
gcugaggcuguggggcuggagu

SEQ ID NO: 3725 - RNA, 22 nt, Artificial Sequence
  miRNA Sequence
aggaggaauuggugcuggucuu

SEQ ID NO: 3726 - RNA, 22 nt, Artificial Sequence
  miRNA Sequence
aagaccagcaccaauuccuccu

SEQ ID NO: 3727 - RNA, 23 nt, Artificial Sequence
  miRNA Sequence
ucugcucauaccccaugguuucu

SEQ ID NO: 3728 - RNA, 23 nt, Artificial Sequence
  miRNA Sequence
agaaaccaugggguaugagcaga

SEQ ID NO: 3729 - RNA, 23 nt, Artificial Sequence
  miRNA Sequence
ugcaccaugguugucugagcaug

SEQ ID NO: 3730 - RNA, 23 nt, Artificial Sequence
  miRNA Sequence
caugcucagacaaccauggugca

SEQ ID NO: 3731 - RNA, 23 nt, Artificial Sequence
  miRNA Sequence
cugggaucuccggggucuugguu

SEQ ID NO: 3732 - RNA, 23 nt, Artificial Sequence
  miRNA Sequence
aaccaagaccccggagaucccag

SEQ ID NO: 3733 - RNA, 22 nt, Artificial Sequence
  miRNA Sequence
ugagaccucuggguucugagcu

SEQ ID NO: 3734 - RNA, 22 nt, Artificial Sequence
  miRNA Sequence
agcucagaacccagaggucuca

SEQ ID NO: 3735 - RNA, 23 nt, Artificial Sequence
  miRNA Sequence
uccaguaccacgugucagggcca

SEQ ID NO: 3736 - RNA, 23 nt, Artificial Sequence
  miRNA Sequence
uggcccugacacgugguacugga

SEQ ID NO: 3737 - RNA, 23 nt, Artificial Sequence
  miRNA Sequence
caguaacaaagauucauccuugu

SEQ ID NO: 3738 - RNA, 23 nt, Artificial Sequence
  miRNA Sequence
acaaggaugaaucuuuguuacug

SEQ ID NO: 3739 - RNA, 22 nt, Artificial Sequence
  miRNA Sequence
ggagacugaugaguucccggga

SEQ ID NO: 3740 - RNA, 22 nt, Artificial Sequence
  miRNA Sequence
ucccgggaacucaucagucucc

SEQ ID NO: 3741 - RNA, 21 nt, Artificial Sequence
  miRNA Sequence
gcaggaacuugugagucuccu

SEQ ID NO: 3742 - RNA, 21 nt, Artificial Sequence
  miRNA Sequence
aggagacucacaaguuccugc

SEQ ID NO: 3743 - RNA, 22 nt, Artificial Sequence
  miRNA Sequence
cugcccuggcccgagggaccga

SEQ ID NO: 3744 - RNA, 22 nt, Artificial Sequence
  miRNA Sequence
ucggucccucgggccagggcag

SEQ ID NO: 3745 - RNA, 21 nt, Artificial Sequence
  miRNA Sequence
ccuggaaacacugagguugug

SEQ ID NO: 3746 - RNA, 21 nt, Artificial Sequence
  miRNA Sequence
cacaaccucaguguuuccagg

SEQ ID NO: 3747 - RNA, 22 nt, Artificial Sequence
  miRNA Sequence
uauaccucaguuuuaucaggug

SEQ ID NO: 3748 - RNA, 22 nt, Artificial Sequence
  miRNA Sequence
caccugauaaaacugagguaua

SEQ ID NO: 3749 - RNA, 22 nt, Artificial Sequence
  miRNA Sequence
uggugguuuacaaaguaauuca

SEQ ID NO: 3750 - RNA, 22 nt, Artificial Sequence
  miRNA Sequence
ugaauuacuuuguaaaccacca

SEQ ID NO: 3751 - RNA, 22 nt, Artificial Sequence
  miRNA Sequence
uggauuucuuugugaaucacca

SEQ ID NO: 3752 - RNA, 22 nt, Artificial Sequence
  miRNA Sequence
uggugauucacaaagaaaucca

SEQ ID NO: 3753 - RNA, 21 nt, Artificial Sequence
  miRNA Sequence
uccucuucucccuccucccag

SEQ ID NO: 3754 - RNA, 21 nt, Artificial Sequence
  miRNA Sequence
cugggaggagggagaagagga

SEQ ID NO: 3755 - RNA, 20 nt, Artificial Sequence
  miRNA Sequence
guagaggagauggcgcaggg

SEQ ID NO: 3756 - RNA, 20 nt, Artificial Sequence
  miRNA Sequence
cccugcgccaucuccucuac

SEQ ID NO: 3757 - RNA, 22 nt, Artificial Sequence
  miRNA Sequence
aggcagcgggguguaguggaua

SEQ ID NO: 3758 - RNA, 22 nt, Artificial Sequence
  miRNA Sequence
uauccacuacaccccgcugccu

SEQ ID NO: 3759 - RNA, 22 nt, Artificial Sequence
  miRNA Sequence
uccauuacacuacccugccucu

SEQ ID NO: 3760 - RNA, 22 nt, Artificial Sequence
  miRNA Sequence
agaggcaggguaguguaaugga

SEQ ID NO: 3761 - RNA, 22 nt, Artificial Sequence
  miRNA Sequence
gugaacgggcgccaucccgagg

SEQ ID NO: 3762 - RNA, 22 nt, Artificial Sequence
  miRNA Sequence
ccucgggauggcgcccguucac

SEQ ID NO: 3763 - RNA, 22 nt, Artificial Sequence
  miRNA Sequence
gacugacaccucuuugggugaa

SEQ ID NO: 3764 - RNA, 22 nt, Artificial Sequence
  miRNA Sequence
uucacccaaagaggugucaguc

SEQ ID NO: 3765 - RNA, 21 nt, Artificial Sequence
  miRNA Sequence
uacucaaaaagcugucaguca

SEQ ID NO: 3766 - RNA, 21 nt, Artificial Sequence
  miRNA Sequence
ugacugacagcuuuuugagua

SEQ ID NO: 3767 - RNA, 21 nt, Artificial Sequence
  miRNA Sequence
uuaauaucggacaaccauugu

SEQ ID NO: 3768 - RNA, 21 nt, Artificial Sequence
  miRNA Sequence
acaaugguuguccgauauuaa

SEQ ID NO: 3769 - RNA, 21 nt, Artificial Sequence
  miRNA Sequence
uacuuggaaaggcaucaguug

SEQ ID NO: 3770 - RNA, 21 nt, Artificial Sequence
  miRNA Sequence
caacugaugccuuuccaagua

SEQ ID NO: 3771 - RNA, 22 nt, Artificial Sequence
  miRNA Sequence
ugcaacgaaccugagccacuga

SEQ ID NO: 3772 - RNA, 22 nt, Artificial Sequence
  miRNA Sequence
ucaguggcucagguucguugca

SEQ ID NO: 3773 - RNA, 22 nt, Artificial Sequence
  miRNA Sequence
ugcaacuuaccugagucauuga

SEQ ID NO: 3774 - RNA, 22 nt, Artificial Sequence
  miRNA Sequence
ucaaugacucagguaaguugca

SEQ ID NO: 3775 - RNA, 21 nt, Artificial Sequence
  miRNA Sequence
cacuguguccuuucugcguag

SEQ ID NO: 3776 - RNA, 21 nt, Artificial Sequence
  miRNA Sequence
cuacgcagaaaggacacagug

SEQ ID NO: 3777 - RNA, 22 nt, Artificial Sequence
  miRNA Sequence
cacuggcuccuuucuggguaga

SEQ ID NO: 3778 - RNA, 22 nt, Artificial Sequence
  miRNA Sequence
ucuacccagaaaggagccagug

SEQ ID NO: 3779 - RNA, 22 nt, Artificial Sequence
  miRNA Sequence
auaaagcuagauaaccgaaagu

SEQ ID NO: 3780 - RNA, 22 nt, Artificial Sequence
  miRNA Sequence
acuuucgguuaucuagcuuuau

SEQ ID NO: 3781 - RNA, 23 nt, Artificial Sequence
  miRNA Sequence
ucuuugguuaucuagcuguauga

SEQ ID NO: 3782 - RNA, 23 nt, Artificial Sequence
  miRNA Sequence
ucauacagcuagauaaccaaaga

SEQ ID NO: 3783 - RNA, 20 nt, Artificial Sequence
  miRNA Sequence
ggggagcuguggaagcagua

SEQ ID NO: 3784 - RNA, 20 nt, Artificial Sequence
  miRNA Sequence
uacugcuuccacagcucccc

SEQ ID NO: 3785 - RNA, 25 nt, Artificial Sequence
  miRNA Sequence
cuagugagggacagaaccaggauuc

SEQ ID NO: 3786 - RNA, 25 nt, Artificial Sequence
  miRNA Sequence
gaauccugguucugucccucacuag

SEQ ID NO: 3787 - RNA, 23 nt, Artificial Sequence
  miRNA Sequence
gcagcagagaauaggacuacguc

SEQ ID NO: 3788 - RNA, 23 nt, Artificial Sequence
  miRNA Sequence
gacguaguccuauucucugcugc

SEQ ID NO: 3789 - RNA, 20 nt, Artificial Sequence
  miRNA Sequence
agagucuugugaugucuugc

SEQ ID NO: 3790 - RNA, 20 nt, Artificial Sequence
  miRNA Sequence
gcaagacaucacaagacucu

SEQ ID NO: 3791 - RNA, 23 nt, Artificial Sequence
  miRNA Sequence
agguugggaucgguugcaaugcu

SEQ ID NO: 3792 - RNA, 23 nt, Artificial Sequence
  miRNA Sequence
agcauugcaaccgaucccaaccu

SEQ ID NO: 3793 - RNA, 22 nt, Artificial Sequence
  miRNA Sequence
ggguggggauuuguugcauuac

SEQ ID NO: 3794 - RNA, 22 nt, Artificial Sequence
  miRNA Sequence
guaaugcaacaaauccccaccc

SEQ ID NO: 3795 - RNA, 22 nt, Artificial Sequence
  miRNA Sequence
uauugcacuugucccggccugu

SEQ ID NO: 3796 - RNA, 22 nt, Artificial Sequence
  miRNA Sequence
acaggccgggacaagugcaaua

SEQ ID NO: 3797 - RNA, 22 nt, Artificial Sequence
  miRNA Sequence
uauugcacucgucccggccucc

SEQ ID NO: 3798 - RNA, 22 nt, Artificial Sequence
  miRNA Sequence
ggaggccgggacgagugcaaua

SEQ ID NO: 3799 - RNA, 22 nt, Artificial Sequence
  miRNA Sequence
agggacgggacgcggugcagug

SEQ ID NO: 3800 - RNA, 22 nt, Artificial Sequence
  miRNA Sequence
cacugcaccgcgucccgucccu

SEQ ID NO: 3801 - RNA, 22 nt, Artificial Sequence
  miRNA Sequence
acugcugagcuagcacuucccg

SEQ ID NO: 3802 - RNA, 22 nt, Artificial Sequence
  miRNA Sequence
cgggaagugcuagcucagcagu

SEQ ID NO: 3803 - RNA, 23 nt, Artificial Sequence
  miRNA Sequence
caaagugcuguucgugcagguag

SEQ ID NO: 3804 - RNA, 23 nt, Artificial Sequence
  miRNA Sequence
cuaccugcacgaacagcacuuug

SEQ ID NO: 3805 - RNA, 22 nt, Artificial Sequence
  miRNA Sequence
ugugcgcagggagaccucuccc

SEQ ID NO: 3806 - RNA, 22 nt, Artificial Sequence
  miRNA Sequence
gggagaggucucccugcgcaca

SEQ ID NO: 3807 - RNA, 22 nt, Artificial Sequence
  miRNA Sequence
ugucuacuacuggagacacugg

SEQ ID NO: 3808 - RNA, 22 nt, Artificial Sequence
  miRNA Sequence
ccagugucuccaguaguagaca

SEQ ID NO: 3809 - RNA, 23 nt, Artificial Sequence
  miRNA Sequence
ccaguuaccgcuuccgcuaccgc

SEQ ID NO: 3810 - RNA, 23 nt, Artificial Sequence
  miRNA Sequence
gcgguagcggaagcgguaacugg

SEQ ID NO: 3811 - RNA, 22 nt, Artificial Sequence
  miRNA Sequence
acaguagagggaggaaucgcag

SEQ ID NO: 3812 - RNA, 22 nt, Artificial Sequence
  miRNA Sequence
cugcgauuccucccucuacugu

SEQ ID NO: 3813 - RNA, 22 nt, Artificial Sequence
  miRNA Sequence
auccgcgcucugacucucugcc

SEQ ID NO: 3814 - RNA, 22 nt, Artificial Sequence
  miRNA Sequence
ggcagagagucagagcgcggau

SEQ ID NO: 3815 - RNA, 22 nt, Artificial Sequence
  miRNA Sequence
ugcccuuaaaggugaacccagu

SEQ ID NO: 3816 - RNA, 22 nt, Artificial Sequence
  miRNA Sequence
acuggguucaccuuuaagggca

SEQ ID NO: 3817 - RNA, 24 nt, Artificial Sequence
  miRNA Sequence
uggggagcugaggcucugggggug

SEQ ID NO: 3818 - RNA, 24 nt, Artificial Sequence
  miRNA Sequence
cacccccagagccucagcucccca

SEQ ID NO: 3819 - RNA, 21 nt, Artificial Sequence
  miRNA Sequence
aaggcagggcccccgcucccc

SEQ ID NO: 3820 - RNA, 21 nt, Artificial Sequence
  miRNA Sequence
ggggagcgggggcccugccuu

SEQ ID NO: 3821 - RNA, 23 nt, Artificial Sequence
  miRNA Sequence
cacccggcugugugcacaugugc

SEQ ID NO: 3822 - RNA, 23 nt, Artificial Sequence
  miRNA Sequence
gcacaugugcacacagccgggug

SEQ ID NO: 3823 - RNA, 22 nt, Artificial Sequence
  miRNA Sequence
ucuucucuguuuuggccaugug

SEQ ID NO: 3824 - RNA, 22 nt, Artificial Sequence
  miRNA Sequence
cacauggccaaaacagagaaga

SEQ ID NO: 3825 - RNA, 21 nt, Artificial Sequence
  miRNA Sequence
cugacuguugccguccuccag

SEQ ID NO: 3826 - RNA, 21 nt, Artificial Sequence
  miRNA Sequence
cuggaggacggcaacagucag

SEQ ID NO: 3827 - RNA, 22 nt, Artificial Sequence
  miRNA Sequence
aaauuauuguacaucggaugag

SEQ ID NO: 3828 - RNA, 22 nt, Artificial Sequence
  miRNA Sequence
cucauccgauguacaauaauuu

SEQ ID NO: 3829 - RNA, 22 nt, Artificial Sequence
  miRNA Sequence
uucaacggguauuuauugagca

SEQ ID NO: 3830 - RNA, 22 nt, Artificial Sequence
  miRNA Sequence
ugcucaauaaauacccguugaa

SEQ ID NO: 3831 - RNA, 22 nt, Artificial Sequence
  miRNA Sequence
aaucaugugcagugccaauaug

SEQ ID NO: 3832 - RNA, 22 nt, Artificial Sequence
  miRNA Sequence
cauauuggcacugcacaugauu

SEQ ID NO: 3833 - RNA, 23 nt, Artificial Sequence
  miRNA Sequence
uuuggcacuagcacauuuuugcu

SEQ ID NO: 3834 - RNA, 23 nt, Artificial Sequence
  miRNA Sequence
agcaaaaaugugcuagugccaaa

SEQ ID NO: 3835 - RNA, 22 nt, Artificial Sequence
  miRNA Sequence
ugagguaguaaguuguauuguu

SEQ ID NO: 3836 - RNA, 22 nt, Artificial Sequence
  miRNA Sequence
aacaauacaacuuacuaccuca

SEQ ID NO: 3837 - RNA, 22 nt, Artificial Sequence
  miRNA Sequence
caagcucgcuucuaugggucug

SEQ ID NO: 3838 - RNA, 22 nt, Artificial Sequence
  miRNA Sequence
cagacccauagaagcgagcuug

SEQ ID NO: 3839 - RNA, 22 nt, Artificial Sequence
  miRNA Sequence
aacccguagauccgaucuugug

SEQ ID NO: 3840 - RNA, 22 nt, Artificial Sequence
  miRNA Sequence
cacaagaucggaucuacggguu

SEQ ID NO: 3841 - RNA, 22 nt, Artificial Sequence
  miRNA Sequence
caagcucgugucuguggguccg

SEQ ID NO: 3842 - RNA, 22 nt, Artificial Sequence
  miRNA Sequence
cggacccacagacacgagcuug

SEQ ID NO: 3843 - RNA, 22 nt, Artificial Sequence
  miRNA Sequence
cacccguagaaccgaccuugcg

SEQ ID NO: 3844 - RNA, 22 nt, Artificial Sequence
  miRNA Sequence
cgcaaggucgguucuacgggug

SEQ ID NO: 3845 - RNA, 21 nt, Artificial Sequence
  miRNA Sequence
aaguuucucugaauguguaga

SEQ ID NO: 3846 - RNA, 21 nt, Artificial Sequence
  miRNA Sequence
ucuacacauucagagaaacuu

SEQ ID NO: 3847 - RNA, 23 nt, Artificial Sequence
  miRNA Sequence
aauauacagggggagacucuuau

SEQ ID NO: 3848 - RNA, 23 nt, Artificial Sequence
  miRNA Sequence
auaagagucucccccuguauauu

SEQ ID NO: 3849 - RNA, 22 nt, Artificial Sequence
  miRNA Sequence
aaucauucacggacaacacuuu

SEQ ID NO: 3850 - RNA, 22 nt, Artificial Sequence
  miRNA Sequence
aaaguguuguccgugaaugauu

SEQ ID NO: 3851 - RNA, 24 nt, Artificial Sequence
  miRNA Sequence
aaucugagaaggcgcacaagguuu

SEQ ID NO: 3852 - RNA, 24 nt, Artificial Sequence
  miRNA Sequence
aaaccuugugcgccuucucagauu

SEQ ID NO: 3853 - RNA, 20 nt, Artificial Sequence
  miRNA Sequence
aauguguagcaaaagacaga

SEQ ID NO: 3854 - RNA, 20 nt, Artificial Sequence
  miRNA Sequence
ucugucuuuugcuacacauu

SEQ ID NO: 3855 - RNA, 22 nt, Artificial Sequence
  miRNA Sequence
aauguguagcaaaagacagaau

SEQ ID NO: 3856 - RNA, 22 nt, Artificial Sequence
  miRNA Sequence
auucugucuuuugcuacacauu

SEQ ID NO: 3857 - RNA, 23 nt, Artificial Sequence
  miRNA Sequence
accuuggcucuagacugcuuacu

SEQ ID NO: 3858 - RNA, 23 nt, Artificial Sequence
  miRNA Sequence
aguaagcagucuagagccaaggu

SEQ ID NO: 3859 - RNA, 20 nt, Artificial Sequence
  miRNA Sequence
acuggacuuggagucagaag

SEQ ID NO: 3860 - RNA, 20 nt, Artificial Sequence
  miRNA Sequence
cuucugacuccaaguccagu

SEQ ID NO: 3861 - RNA, 23 nt, Artificial Sequence
  miRNA Sequence
agagguuuucuggguuucuguuu

SEQ ID NO: 3862 - RNA, 23 nt, Artificial Sequence
  miRNA Sequence
aaacagaaacccagaaaaccucu

SEQ ID NO: 3863 - RNA, 22 nt, Artificial Sequence
  miRNA Sequence
aggcauuagauucucauuagga

SEQ ID NO: 3864 - RNA, 22 nt, Artificial Sequence
  miRNA Sequence
uccuaaugagaaucuaaugccu

SEQ ID NO: 3865 - RNA, 24 nt, Artificial Sequence
  miRNA Sequence
agggacuuuugggggcagaugugu

SEQ ID NO: 3866 - RNA, 24 nt, Artificial Sequence
  miRNA Sequence
acacaucugcccccaaaagucccu

SEQ ID NO: 3867 - RNA, 26 nt, Artificial Sequence
  miRNA Sequence
aguugguccgaguguuguggguuauu

SEQ ID NO: 3868 - RNA, 26 nt, Artificial Sequence
  miRNA Sequence
aauaacccacaacacucggaccaacu

SEQ ID NO: 3869 - RNA, 20 nt, Artificial Sequence
  miRNA Sequence
auaggacucauauagugcca

SEQ ID NO: 3870 - RNA, 20 nt, Artificial Sequence
  miRNA Sequence
uggcacuauaugaguccuau

SEQ ID NO: 3871 - RNA, 22 nt, Artificial Sequence
  miRNA Sequence
auauacagggggagacucuuau

SEQ ID NO: 3872 - RNA, 22 nt, Artificial Sequence
  miRNA Sequence
auaagagucucccccuguauau

SEQ ID NO: 3873 - RNA, 22 nt, Artificial Sequence
  miRNA Sequence
aucauacaaggacaauuucuuu

SEQ ID NO: 3874 - RNA, 22 nt, Artificial Sequence
  miRNA Sequence
aaagaaauuguccuuguaugau

SEQ ID NO: 3875 - RNA, 22 nt, Artificial Sequence
  miRNA Sequence
auccccagauacaauggacaau

SEQ ID NO: 3876 - RNA, 22 nt, Artificial Sequence
  miRNA Sequence
auuguccauuguaucuggggau

SEQ ID NO: 3877 - RNA, 22 nt, Artificial Sequence
  miRNA Sequence
caacaaaucacagccggccuca

SEQ ID NO: 3878 - RNA, 22 nt, Artificial Sequence
  miRNA Sequence
ugaggccggcugugauuuguug

SEQ ID NO: 3879 - RNA, 23 nt, Artificial Sequence
  miRNA Sequence
caggcagugacuguucagacguc

SEQ ID NO: 3880 - RNA, 23 nt, Artificial Sequence
  miRNA Sequence
gacgucugaacagucacugccug

SEQ ID NO: 3881 - RNA, 27 nt, Artificial Sequence
  miRNA Sequence
ccccccacugcuaaauuugacuggcuu

SEQ ID NO: 3882 - RNA, 27 nt, Artificial Sequence
  miRNA Sequence
aagccagucaaauuuagcagugggggg

SEQ ID NO: 3883 - RNA, 22 nt, Artificial Sequence
  miRNA Sequence
cugugguuccuguaugaagaca

SEQ ID NO: 3884 - RNA, 22 nt, Artificial Sequence
  miRNA Sequence
ugucuucauacaggaaccacag

SEQ ID NO: 3885 - RNA, 21 nt, Artificial Sequence
  miRNA Sequence
gagagaucagaggcgcagagu

SEQ ID NO: 3886 - RNA, 21 nt, Artificial Sequence
  miRNA Sequence
acucugcgccucugaucucuc

SEQ ID NO: 3887 - RNA, 26 nt, Artificial Sequence
  miRNA Sequence
gcauuggugguucagugguagaauuc

SEQ ID NO: 3888 - RNA, 26 nt, Artificial Sequence
  miRNA Sequence
gaauucuaccacugaaccaccaaugc

SEQ ID NO: 3889 - RNA, 18 nt, Artificial Sequence
  miRNA Sequence
gcguuggugguauagugg

SEQ ID NO: 3890 - RNA, 18 nt, Artificial Sequence
  miRNA Sequence
ccacuauaccaccaacgc

SEQ ID NO: 3891 - RNA, 22 nt, Artificial Sequence
  miRNA Sequence
gcucugacuuuauugcacuacu

SEQ ID NO: 3892 - RNA, 22 nt, Artificial Sequence
  miRNA Sequence
aguagugcaauaaagucagagc

SEQ ID NO: 3893 - RNA, 22 nt, Artificial Sequence
  miRNA Sequence
ggagacugaugaguucccggga

SEQ ID NO: 3894 - RNA, 22 nt, Artificial Sequence
  miRNA Sequence
ucccgggaacucaucagucucc

SEQ ID NO: 3895 - RNA, 23 nt, Artificial Sequence
  miRNA Sequence
ggaggaaccuuggagcuucggca

SEQ ID NO: 3896 - RNA, 23 nt, Artificial Sequence
  miRNA Sequence
ugccgaagcuccaagguuccucc

SEQ ID NO: 3897 - RNA, 23 nt, Artificial Sequence
  miRNA Sequence
gggggccgauacacuguacgaga

SEQ ID NO: 3898 - RNA, 23 nt, Artificial Sequence
  miRNA Sequence
ucucguacaguguaucggccccc

SEQ ID NO: 3899 - RNA, 19 nt, Artificial Sequence
  miRNA Sequence
guaaugguuagcacucugg

SEQ ID NO: 3900 - RNA, 19 nt, Artificial Sequence
  miRNA Sequence
ccagagugcuaaccauuac

SEQ ID NO: 3901 - RNA, 20 nt, Artificial Sequence
  miRNA Sequence
gucucuguggcgcaaucggu

SEQ ID NO: 3902 - RNA, 20 nt, Artificial Sequence
  miRNA Sequence
accgauugcgccacagagac

SEQ ID NO: 3903 - RNA, 22 nt, Artificial Sequence
  miRNA Sequence
ugagucuguaagaaaagaggag

SEQ ID NO: 3904 - RNA, 22 nt, Artificial Sequence
  miRNA Sequence
cuccucuuuucuuacagacuca

SEQ ID NO: 3905 - RNA, 21 nt, Artificial Sequence
  miRNA Sequence
ugggcuguagugcgcuaugcc

SEQ ID NO: 3906 - RNA, 21 nt, Artificial Sequence
  miRNA Sequence
ggcauagcgcacuacagccca

SEQ ID NO: 3907 - RNA, 24 nt, Artificial Sequence
  miRNA Sequence
ugggcuguagugcgcuaugccgau

SEQ ID NO: 3908 - RNA, 24 nt, Artificial Sequence
  miRNA Sequence
aucggcauagcgcacuacagccca

SEQ ID NO: 3909 - RNA, 23 nt, Artificial Sequence
  miRNA Sequence
uggucgaccaguuggaaaguaau

SEQ ID NO: 3910 - RNA, 23 nt, Artificial Sequence
  miRNA Sequence
auuacuuuccaacuggucgacca

SEQ ID NO: 3911 - RNA, 23 nt, Artificial Sequence
  miRNA Sequence
uggucgaccaguuggaaaguaau

SEQ ID NO: 3912 - RNA, 23 nt, Artificial Sequence
  miRNA Sequence
auuacuuuccaacuggucgacca

SEQ ID NO: 3913 - RNA, 20 nt, Artificial Sequence
  miRNA Sequence
uguagggauggaagccauga

SEQ ID NO: 3914 - RNA, 20 nt, Artificial Sequence
  miRNA Sequence
ucauggcuuccaucccuaca

SEQ ID NO: 3915 - RNA, 22 nt, Artificial Sequence
  miRNA Sequence
uguagggauggaagccaugaaa

SEQ ID NO: 3916 - RNA, 22 nt, Artificial Sequence
  miRNA Sequence
uuucauggcuuccaucccuaca
